United States Patent Application Publication US 2018/0216167 A1 - sequence listing, part 3

SEQ ID NO: 1 - DNA, 4769156 bp, Stenotrophomonas maltophilia D457 (residues 3,179,439-4,769,156 of 4,769,156)
tcggtaccaccatgaccggcgtgctgggcatgctgccgaccgcgtcgttcgcactgttcggcgtggccacgccggcactggcgcggcgcctcgggctggagcgcaccacgctgctggcgatggtgatggcgatggccggcctgctgctgcgttccagcgccggcaacgtcggcacgctgctgttgggttcggtggtggcactggccggcatgggcatcggcaacgtggtggtgccgccgctggtgaagcgctatttcgccaacaaggtcggcaccatgagcacgctctacatcagcgtgctgcagctgggcacgatgctgccggcgctgctggcggtgccggtggccaacgccgcaggctggcgcgtgtcgctgggcatgtgggcgctgctggcgctggctgccgcactgccgtggctggtgctggccacgcgcgcgccgaagccgcagtccaacgtgtccgatccgaccgcgcagccgcatggcaaggtctggcgcacgtcactgggctggagcatgacgctgatgttcggcatgacctcgctgatgacctactcgatgttcacctggctgccgcgcatcgtggtcgaggccggtggcacgcccgcgttcggtggcgtgatggtcgccgtgttctcggcgctgggcctgctgccatcgctggtcattccgtcgatggcggtgcgcatgcagaacccgttcccgctggtgctgattggctttttctcgttcgtgatcgccttcaccggcctgctgctggcaccgatgaaggcccccctgctgtgggcctgcctgctcggcgtcggcccatccaccttcccgctggcactgaccctgatcaacctgcgcacccgcaccccgaccggctcggcggcgctgtccggcttcatgcagggcgtgggctacagcttcagctgcctgggcccgttcctggtcggctggctgcacacggtcagcgacggctggaccctcccgttcagcttcctgttcggctgcgccgccctgatgctgtgcgcttcgtgggtggcctgcaagccgcgcaagctggaagatctctggtaagccacgtcgggcccgcaaccgggcccacctaccattcgtcagcccgtctgcgcattttgacgccgggctgacaattccgggcggatagtgcccacgaatgccccatccttgccgcgtgccggcatcgggcatgggggcggcagcgccgcccgggccaccactcggtgtgcgggggactttcgtttcagacaagacatcgcaggtcgctgtccgggttgtatccgtcttcgctgggcgggaatgcacgaagggagtgacgcgggccacggccacgccaaaagctggcatgtgatgtgcgtcacatttttcaggttgtctggttcggaagccaagggggtccccaatggttgtccaccgccggctggcgctctgcgtcggcctcgcctgcaccgccctggcctgggcgagcagcgctgccccgcccgaccgcgaagcagcgttggccgagatcggccgctatcgagaccaggcgcgttggctggacgccctgggcgcgatcgagcgcgccagccagcagcaacccaacgacgacctgctgttcaagctgcgcgtattgacgctgggcgacatcggcaacgcctggcgtgcgtgggagctgtaccagcagcgcccgcaactgttcgacgctgcgcagaaacagcgcctggaaggcgactacctggccaagctggtggtctggagcctggcctacagcagcagcgaggacagccgcctggaagaagccgaatcgaccctggcccgcatgcagcgctacctcggcggcgaaggcaccccgccctcgcaggcaccactgcggatccgcatggaccggctgatcctgctcaaccggctgggccgccatgcacaggtccgcgaggaagcgcgggcactgcaggccgaaggccacaccctgcccgactacgtgctgcccgcagtgggcgattcgttgatgggcaccctgcacccggaagaagccatcccggtgctgcaggcggccgtcgctggcgacccgacgcgcgacgcctcgcattcggaactggcttacgcctacctggaaagcgagcagcaggaaaaagccatcgacctgctgcaggcatggcgcgacaaggagccggcgtggcgctggagcaacggcaagtcgccgtacgcgaactggtcgcgctacgaggccgatctcaacctggcgatggtgcgcgcctacagcggcgacctgcacaccgcgcagcacgacctggagtcgatggtcgagatcgcacccggcaacggcgggctgcagagtgcgctgggcagcgtctacatgatgcgcggctggccacgccgggcgctgcagcgccagcagatggcacacgcgctcgatccgcgggacatcgaaccgcggctgggcatggaagaggcctatgtcgccctgcagcgcgacgacctggcgcggccgctgcacgatgacctggtcgcacgctaccccacccagccggccgtcgaacgcatggaccaggcctggcgcgcgcatcgcggctggcagctgaaggcatggaccgacatcggccgcagctccgggggcggtggtacttcgcccctgggcaacaacgaccgccactacggcgtggacgtggagacgccggtccttgatgaccgctggcggttgttcgccctcgccgaccgtcgcgtgaccgacttccaggaccagcgcatcgatcccctgtggctgggtgcgggcgtgcgttaccgcttcgggcaactggatgcggaagcggcggtcctgcgcgccaacgatcacatcggcgacaccggcctgcgcgtcggcgtcggctggcagttcaacgattcctggcacgccggcgtggtggtcgcacgcaatgacccggaggcctcgatgcaggcgcgcgcggccggcatcaccgccgacagcgtgagcgcacaggtggactaccggcgcagcgagctcacccactggacgttcggcgcgagccgcttccgctatgacgacggcaaccaccgcgagctgttcggcaccagcgtccaacagcgcctgctgacccgcccacgctggctggtcgatggcctggccagtgcctacaccagtcgcggcagccgcgatgatgcgccctacttcaacccgaagcgcgaccgcatggtcgagatcggcctgcgcatcgaccagcagctgtggcggcactacgagcgccacttccggcaccggctgaccgtctcgctgggcgactactggcaggacggcttcggcagcgcgttggtgccgtcggtgtcctacatgcacgagtggcagctgggccctggccgcatgttcgagtatggcgtgcggtggtcacgaccggtctacgatggccatcgcgagcgccatatcggcttcgaagccgcattgcgctggggagactgacatggcccgcttcctgcgactgatcgtgctcctgctgctggcctgcgtgccaccggcgttcgcgcagcagcccctgcatcttgatgcgatcgacaacggcctgctgatcctcagctaccacgacatccgcgacaaggtggccgccaagggtgatgccgattcctatgcggtgagcacgcagaacttcgccgcgcacctggactggctgggcgcgcacggctaccacccggtttcgctgtcgcagctgatcgaggcctcgcagggccgcgccacgctgcctcccaagccggtgctgctgaccttcgacgatggcctgcgcagcgtctacgacaaggcgttcccgctgctgcaggcctaccactacccggccctggtggcggtgatcaccgattacgtggacatggcaccgggccgcaccatcgactacggctaccgcccgttcggccacgatgacttcgtgacctgggcgcagctgaagcagatgcacgacagtggcctgatcgaagtggccagccataccgacgacctgcaccacggcgtgcttgccaatccgcagggaaactccacgcccgccgtggtcacccgcatctacaccccggccacgcgcagctacgagagcgggacacagtatgagcagcgcctgcgcactgatctttcgcgcagcgtgcagcgcatccagcagcacctgggcgtgcgcccgcgcgccatcgtctggccatatgccgcgtacaaccagttgagcaacgacatcgccgagcagctgggcatgccggtttcgttcgacctggaaggccgtagcacgccagtggcccgcgacctgcacgggctggcacgattgctggtgagcaacaacccgaccgtggaaggcctggcctacgaactgcgccgagacgtggcgctcgatggcatccgcgccctgcagatcgatctggatgacatgtatgacccggatccagcgcagcaggcacgcaatctcgatgcattgatcgagcgggtcaagcgcatcgcgccgacccatgtctatctgcaggcctttgccgacccggacggcaacaacaccgccgatgcgctgtatttcccgaaccggcacatgccgatgcgggcggacctgttcagccgcgtcgcctggcagctgaaatcccgcgcgggcgtgaaggtctacgcgtggttgccagtgctcggcttcgaactgcccgacccggagcagcgcaaggtgctggcgatccgcaatggggatgccgacggcatgtaccggttggatttcaccaacccgaaggccaggcagatcatgctcgacatctacgaggacctggcggtcaattcctacttcgaaggcctgctgttccatgacgacggctacctgcgcgacaccgagctgcccgccctggcggccggcgaagatggcagcgcacgtacccaggcactgatcgacttcaccctggccctgcgcaacagcgcgcagcgctggcggccgaaactggcaacggtgcgcaacctgtatgccgagccggtactccgcccgcagagcgaagcctggttcgcgcagcgcctggacctgttcaacaaggcctacgaccagacggcgctgatggcgatgccgtggatggaaggcagcaggcaccccgagcgctggctcgaccagttgctggccgcggtacgcgcgcacgacccgcagcttcagcacacgctgttcgagctgcagaccgtcgattggcgcagcgggcagccgattcccgccgggcgcctgcgtgcgcagatccgccaattgcaggcgcagggcgtgcaccacttcgcctggtaccccgatgacttcatcgccgaccagccctccacccgcgatgcccgcgcggcaatgtccgccggcaacttcccgtacccggagaagtgacgtggacatgcatccgctgctgcaggtcctgttccagttcgccttctactacccgatggtgatggcgttcttctggatgtccggtggcctgtactactacttccggcgcgagcgtcactcacgtccgcgcaacgatccgcccttgatgatcgcccctcccttcgcgaccttgctggtgccctgccacaacgaagcagaaaacctggacgacacgctcactgcggcgctggcccagcgctaccccgccgattacgaagtgatcgccatcgacgatggcagcagcgatgacaccggcgcacggctggatgcgctggcggcaaggcatccacggcttcgcgtgctgcacctggaccgcaacctgggcaaggccaatgcgctgcgcatgggcgcactggccgcacgctcggagtacctggtgtgcatcgatggcgatgcgatgctggaagagcatgcactgcactggatggtctggcacctggtcagtggcaaccgggtcggtgcggtcaccggcaacccgcgcatccgcaaccgctccaccctgctcggacgcctgcaggtggcggaattctcctcgatcatcggcatgatcaagcgggcacagcgcgtgtatggccgcatcttcaccatctccggcgtgatcgccggcttccgccgcactgccctgcaccaggtcggctggtggtcggatgacatggtgaccgaggacatcgacatcagctggcgcctgcagcgcgcgcactgggacatccgctacgaacccaatgcgctgtgcttcatcctgatgccggagacgctcaagggcctctggcggcagcgcctgcgctgggcccaaggcggcgtggaagtgatgctgtgccacgcgcgctcgctgctgcactggaaagagcggcgcatgtggggcgtgctgctggagtacgtgttgagcgtggtctgggcctacacgatgctgttcatcgtgctgctgtgggcactgggcaagttcatcgagctgccgccgcagctgcatatcgccagcctgctgccggagtggcatggcgtgatcctggcgctggtctgcctgctgcagttcgccagcagcctgatcatcgaccggcgttacgaaacacagattggacgcaattacttctgggtcatctggtacccgatggcgtactggctgatcagcctttccaccaccctggtggcgctgcccaagacgctgctgcgccgtcgcagcaagcgcgccacctggaccagccctgaccgggggatccgatgaacgcgcaacgcccgtccaaccgcttcgactcgcggatgatccgcaagccgcatcgccagccacacttccagcgcactgcctggggcttcgtcaccctggcgttctggggcttctacttctatctgtgggcccccctggtgaccctgctctcgtggctgatcggtggccagctggcctggcggcagctctacgaacggcagaaccagttcgacccgtacgtgctggtcgcgctgccattgatgctgctgtgcgccagcgtgctgctgatcgcctgggccgagtacaaccgcgcccgcttccgtggccgcgaacgccgcctgccgcggcccctggccagcctcaacgaagtggccgccgatctgggcgccagcaccgggctggccgaacgcctgatgggctgcaaggccgccacgctgcacatggatgatcacgcacggccggtcggcatccgccgcgaggtggtgtagctgccgacctgggtcggcgcttgggcctggtgggtgccgaccttggtcggcaccggggtttgccgcgaagagcatccacgcgaggcgtggatccacttatgtacgcgtctgcccttcaccgcgcacgacaaatcgttcaacggtgagggcttccaagcccatcgggccgtaggcgtgcaggcgcgtggtggaaataccgatctcactgcccaggcccagctggccaccatcggagaagcgcgacgaagcgttgaccatcaccaccgccgagcgcagcgcgttgacgaagcgctcggcgtggccggtgtcctcggtggcgatcacttcggtgtggtcggaggtataggtgcggatgtgcgcgatggctgcatcaagatcatcgaccacgcgcaccgccagcaccagatcgaggaactcggcggcgtaatcctcctcggtcgccgccgtgctgcccggcagcaacggctgcgcctgcgcatcggcgcgcagctgcaccccacgctcacccagcgcctgcgccacgcgcggcaggaacgcgtcagccacggcgcggtgcaccagcagcgtctccagcgaattgcacgccgccggccggctgcacttgccgtccaccagcaggtcgatggccttgccgaggtcggcgctggcgtccacgaacaggtggcacacccccttgtaatgcttgatcaccggcacgcgcgcgtgctcggccacgaaacggatcaggccttcgccgccacgcggaatggccaggtcgatcagctcatgcagctgcagcagttccagcatcgcctcgcggcgcaggtcggtgagcacggtcaccgccgccggcggtacgccgttggccttcaatgcaccggccagcgcctgggcgatggcggtattggagtggatcgcttcggaaccaccgcgcaggatcacgccattgccggccttcaggcacagcgcggcggcttcggccgtcacgttcgggcgcgcctcgtagatcatcgcgatcacgcccagcggcacgcgcaccttctgcacgcggatgccgttgggacgtacgtcgtcgcgcgtcacctggccgaccgggtcaggcagcgcggccacctcgcgcaccgcctcggccatcgcgaacagccgcggcgggtccagtgcgaggcggtcgagcatggcactgccaacgcccttgtcgcgcgcggcggcgaggtcgcgtgcgttgccggccaggatcagtccggcatttacttccagggcctgcgccatcgccagcagcagcgtgcgtcgcgccgcactgtccaggccggcaacgatctgcgctgcatcacggcaggcgcgcgcctgggcttcgatttcgctcatcggggtgtccttcaaaccggtcatggcagcaccaggtcgtcacgatggacgacgctgccgccgtagttgtagcccagcacggcctggatgtcgcgcgaatgatggccggcgatccggcgcacgtcgtcggccgcgtactggctgacgccgcgggcgacacagacacgcccctgaggtgcgatccagcacacctgcaccatgtcgccgcgccggaatgccccctcggcagcggtgatgccgccgggcagcagcgaggcgcccttctcccgcatcgcctgtgccgcaccggcatcgacgacgatcgcgccctcggccagcggcgcgtgccgcagccagtgcttgcgggcagcctcgcggctgcgtgcggcgtggatgcgggtgccgaacaggcggtcctgcgccagcgcgcgcaccacatcgctgctgcggccgttgaacaggtaggtctcgatgccgaggcggcccgccttggccgccgcctccagcttggtacgcatgccgccggtgccggcgcgcgagccggcgccgccggccatcgccagcacatcgtcactcagttccggcacgtcgtgcagtggccgcgcgtcggccacggtgcgcggatctgcgctgtacaggccgtcgatgtcggtggcgatgaacagtgcatcggcatcgaccagcgcggccacggtcgcggccaggttgtcgttgtcaccgagcttgagctcgtccaccgatacggtgtcgttctcgttgaccaccggcagcgcacccagccgcagcagttcgctcagcgtggcgcgtgcattgaggtagcggcggcggttgcgcaggtcgtcgtgggtcagcagcacctgcgccaccgggcgctcgaagaagcgctgccagagcccgatcagctgcgcctggccgagcgcggccagggcctggcgcgccgccatcgccgcaccgggttcatcggcccgcggcaggatcgcgcgccccgccgcaaccgcgccggaggagacgatcaccacctcgcgcccagccagtacgttggcggacacaaactgggccaggcccagcgcgtggcgtggcgacaggccgccaccatcggccgccagcaggctgctgccaaccttcagcaccgcacgccgccatggcggcagcgcctgttgcgggaacggcgaagcgacggtggcggcgtgcagggtcatcggtcagggcctcagcgggtattccattcgtgcacggtcagctcggaagcgtgcatcgtcaccagcggatcggtggcaacgatggcccgcgcctgttccaggctctcgacattgcacagcacataggcgccaccgctgccatcggcgaaaccaccggtcagctgcagctttccctgtgcctgcaacgcctcgaggaaatcgcggtgcggctgcaccgccgcatcgttgaagtccggccggcgcatcgccatcaccagatagacagtgcccgccatcaggacagcgcctgccagcgtgcgcgcagttcgtccaggcgcagatcggcagccgagcccggcgatacacgcgcagccaggctgccttccggggtacgtccctgccctgcgctgtcggcaccggctgcagcggccttgtaggcctcgcggaacggcacaccggccaccgccgcttccacggcgacgtcggtggcatacatgcccgaatcgatcgctgcgcgcagcctgtcgtcacgccactccagattggccagcagcgccggcagcagttccagcgcggccaggccacggccgaagccgtggaagatggcgcccttggacgactgcaggtcacggtgataacccgaaggcagcgacagcagctgctcgatctcggtgcgcgcggcggcgacgctggcgtgggtcgcacgcatcagctcgatcacgtccgggttgcgcttgttgggcatgatcgaactgccggtggtgtactgcgccggcagcgcgacgaagccgaactcggcgctggtgaacagcgacaggtcccaggcgatgcggcgcaggtccagcgtagcgccaccgagtgcttccagcgcggccagctcgaacttgccgcgcgacagctgtgcgtagatcggcgagatctgcatgcgcgcgaaaccgagcgcggccgtggtgtgctcgcggtccagcggcaggttcaccccgtagccggcggcggtgccgagcggattggcgtcgaccagcgcatgggtgtcacgggcgcggatggcgttgtcgatgaaggcctcggcccatccggcccaccacatgccggccgaagagaccacggcgcgctggatatgggtatagccgggaatcggcaggtccttctcggcctgcgcacggtccagcgcgatcttggccacgtcggtgctgagcccggccacgcgcagcagcttctccttcagccacaggcgggtggcgaccaggatctggtcattgcggctgcggccggtgtggatcttgcggccagcgtcgccgaggcgttcggtcaaacgcgcctcgattgctgagtgaccgtcttcgtactgcgtatccagcacgaagcggccttcacggaaatcctgcgccagcacgtcgagctcgcgcagcaggcctgccagctcgtcggcgctgaggatgccgatgtgctgcaggccctgcgcatgcgcggcgctggcagcgatgtcatgcaggaagaactcgcggtcgaggatcacgtcgtcgccggcgaggaaggtctggatctgggcgtcgacagcgacgccgggcttctgccaaagaaggtctgccatgggggctccggaaggcgtgttcagtgcgggatcgacgtcagttcgtcgatgcccagcgcaaggttgaggttctgcatggcctgggtggccgcgcccttgagcaggttgtccagggtcgccaccaccaccacccgcttgccgccaggggccagggtgaagccaccgacctgggcaccgtggcggccggcgatgcggctgacccacggcgcttcatccaccacttcgatcaggggttcgccggcataggcctgctggaagcgctcgacgatctgttcgcgggtctgcacgcggttcagccacaggttggcggtcagcgtgatgccgcggaaatgcggcgcgacgtgcggcatgaactcgacggccacgcccagctgcaccgacacctcgcgctcgtgcacgtggttggtcagcgcatacggcatcaggttgtcggccagcagttcgacgttgttcttgtccgacggcgtggtaccggcaccggagtagccggagacaccgaagcactgcggcgggccggccagcaggtccagcagcggatgcaccgccagctgcatcgccgtggcatagcagcccgggttgctgatgtgcttctggccgttgtagcggccgcgggtcagctccggcaggccgtaataccagctgttgtcgaagcggtagtcggccgagagatcgacgatgacggtgtccggcttggcggcttcaagcgcggccacgaacggtgcggccaggccgttgggcagggccaggatcaccgcgtccacgcctttggcggccaccgcgtcggcatccaggttctcgtactgcagctcgccctggaactccgggtggtggtcggacaggcgctgcccggcgcgctcgcgcgaggagacgaaggccagttccaggcgcggatgggcggccaccagcttgatcagctcggcgccggtatggccgcgggccccgacgatgcccagggtgaaagtcgaatcgttcatgcgtggctgtccaggcggtactgcaggtggcgcttcacgccctgccattccgcatcgatgatggagaagatgacggtgtcgcgcggcgtgccgtcggcgtgccgcttgtggttgcgcagcacgccatcctgcttggcgccgaggcgtgcgatggcggtgcgcgaagtgaagttgaaccagctggtctcgaacacgacgctcaggcactgcaaccgctcgaacgcgtggctgagcagcatcagcttggtctcggtgttgaccccggtgcgttgcgcagactcgccataccaggtgtaaccgatactcaggcgcggcacgtcggcttgcagatcgtagtagcgggtggtgccgacaatctggtcgttggcatcgaacaccacgaacggcagcaccctgccttcggcctgcgcctgcagcgctgcctgcacgtagccggccatggtcttcgcatcgggcacctgggtgtaccagagcctggacaacgcgccatcgccaagcgcgccgcgcaggccatcgatatgccccatctgcagcggctccagccgcgcatgggtgcccgccagcgtagggaccttggtccagtcggcatggttcatgtgttcagccctgcaggctcggcgcgcgccgggcgcaatggtcgacataggtcttgatccggtcgatgccgtcggcgccgaaccagaacaccttccagtggtcctgcttgtagcagccgtcggattcagcgtaatagaagtggttgatcggattgccatggcgcgaacgccagaacagctgcggggtttcctccagcatcacgttccagaccgcgcggcccaggccctcgccctgcgcatcgtcgagcacggcgaacttgtccaggtacacgccctcggcctcgtcggtgaggatcaccgcggtgcggtagttctcgctgacgtaggcgcgcagcagcttcgtcttttcgaagtactccggcaccagggtgcggccgaagctggattcgatcaggctcttcaggcgcggcaggtccagcgcgttccaggcggtggcgcgcagcaccttctcgcccttgcgcaccagcgtgcccgaccccttgtgggtgaacagttccttggccaggtcggccgggcgcgtgatcgacaccgacgattccagcggcaggcgatcgagcagatccttgatctgttcgatcttcaccttcatgccgccgtggatccacggctgcgcgatcaggtggtcgtactcggtggacaggttgatcgaatcgatcacgttgccctgctcgtccagcaggccgccagtgccggtcaggaagatgatcttgtatggctgcagttcctgcaccagctcgttggcggcgaagtcggcgttgacgttgaggatctggccgccagcggtctcgcccaggctggtgatgaccgggatcgacccggcacgcaggctggcctcgatcggtgccaggttgaccttcttcacctcgccgaccaggccgtaggtgtccacgtccaggtactcggcctcgaacacgccgccggtgatcgaggtggcgcgcgcgccgttctgctgcagcgcctcgaccaggcgcaggttggactgctggaacacccggcgcacgatcgccagcgcttccggcgacgtcacgcgcaggccgttgacggtctgcttctcgatgccggcggccgacagttcggcatccagctgcgggccggcaccgtgcagtacgatcggggtcagcccgacttcctgcaggaacgacagcgaagaggtcagcgcgtcgaggtcgtcgcgcagcaccgcgccgccgaccttgaccacggcgaagcgcttggcgtccagctgcgagaagcgcttgaggtactggctgatctccttcgcgctggccatgctggaaagcaggcgcacgatggtctggcgggtctggcggtggggctggagggcaggagacatttcggtttcgtcacaggcggcggtcgccgcgttgcagttccacccggccagggccgggcggcgttgtagggtcgatcaggcgccggcggcgatgatgcgatgcacggcgtcggtgtagcgctgcagctgctccagcgtcacgaactcatcagcggtgtgggcctgggcgatgtcgcccgggccgaacaccagcgtggtgtagccaccggcggagaacagcgaggcctcggtccagaagtccaccgcgttgccgatcggcagctccagcgcatcggccacatcgcgcgccagcaggcggcggttctcggcctcggcgatgtcaccggccggcaggctggggccacggaacgtttcggtgaaaacggcggcttccggttcggcgaaaccggcgaaggtcgccagcaggccatcgatgtccatcgacggcagcgggcgaaacccgaagcgcacctcagcagccggtgcgatcatgttggccttgatcccgccttcgacgcgaccgatgttgaagcgcagcccggtcagcccgccgaagcgggccgaggccagcgattccacatggtccagtgcacggttgccccagcgcatggcctggtgcagcgcgctggcggccgcgtcctgcttgccggacgcatggccggcgcggccggcgaactgcatcagcaccgagctgatgccacgatgcgccagcaccgcttcactcatggtcggctcggccaccagcaccgcttcatacggcaggccacgggccaggaacgcggcgatacagcgcggatcgttggcttcctcgtcgctggagaacaggaaggcggcatcgccatcgctggcattggccgccgccaccagcgcagcggcggcgcccttgatgtcacacacgcccaggccgaccacgcggtcgtccaggcggcgcatcacatgcgggtcggcactccagtgcggcgagtccggcacggtgtccaggtgcacgttgaacaggtacttcggcgtcccgcgcacggcgtacaggctgactgcgcccgcgccatggtcgatcacctcgacgttgaagccgggcaggttgtcgcgcaggtaatcgaagatgccaccggtggtgatcgcacgcggcgggttgcgggtgtcgaaggacaccagggcctgcaggtgatcgagcgtctgttcaagcatgtgtctgaatatccgtagggttcgaaatcggtagtgccggccgctggccggctccgcaatgatccagccgagccacgagccggccagcggccggcactaccctccatcgacgttgcgaggcgccggccagcggccggcaccccgtcacaggtcaaccgcggttgacctgcgcgtaaacggtggagctcatgccgaacagcttgatgaagccttcagcctcctccacgccccagtcggccgattgcgcgtaggtggcgcccttggtgttgagcaggtgcggcgacttcacggccaccgcatcgacgcggccaccacgggtttccagcaccacttcaccgttgaccttggcctgcgaggacttcaggaaggcttcgatgtcggtcttcagcgggtcgtggtagaagccttcgtacaccagctccacccacttgcgcgccacgtccggcttgaagcggttctgctgcttggtcagcaccgcatcttccagcgcacggtgtgcggccagcagcgaaaccaggcccggggcctcgaacacgatgcggcccttcaggccgatcacggtgtcgccggtgtagacgccgcggcccacgccgtacggggcgaacagcttgttgagctgggccaggatctggtcgcccggcagcgccttgccatccagttcgacggcttcgccttcaacgaacttcagggtcacggtcagggcctgctccggccactcgctgcgcggtgcgcaccagccacgcgcgccctcgcccggagcttcccaccggtcgatctcgccgccggacatggtcaggcccagcaggttctcgttgatggtgtaggcctgctgcttggcgcgcacgccgaagccacgctcttccaggtacttctgctcgtaggcgcgggtctgggtgtgttccttctggatctcgcggatcggcgcgatgatctggtagtcgcccagcgccttcacggccaggtcgaagcggacctggtcgttgcccatgccggtgcaaccgtgggcgatgatgttggtgcccagctcggcagcacgcttcagcgcggcatcgacgatcaggtagcggtccgagaccagcagcgggtactggccctggtagccttcgccggcccacacaaacggcttgacgaagccttcccagatggccgggccaccgttgacggtaaggtggctcgccacgcccagttcggcggcgcgcttctcgatgaagtcacgctcttcatcatcgacgccgccggtgtcggcgaacacggtgtgcacgttgtagccgcgctcctgcaggtacggcacgcagaagctggtatccaggccgccggagaaggcgagaacgacgtctttgttgctcatgggggtcaggtccacttgggggatgggaattcggtagagccgaccgttggtcggctggaatattggatgcgccgctgcgggagcagccgaccaacggtcggctctaccccttgttcgatctagcgcccggcaaccgccgccatgatcgccttctgcacgtgcaggcggttctcggcttcgttgatggcgatgcactgcggcgaatccatcaccgcgtcggtggccttcacgttgcggcgcagcggcaggcagtggctgaacacaccattgttggtcagcgccatcttccgctcgtccacgatgaagtgcttgaactggtcgcggatcggcttctccggttcccagttgccgaagaacggcagcgcgccccagctcttggcgtagaccacgtcggcgccggcgtaggcgctgtcgatgtcatggctgatcttcagcgagccgccgctctcggccacgttctgctcggcccagcccatgtaacgctcgtcgaggatgtagtcggcggtcgggcacagcagggtcacgtccatgcccatgcgggtggcgatggtcagcgccgaattggcaacggcggtgttcagcggcttggggtggtaggtccaggtcagcacgtacttcttgccacgcaggtcctgggtgccgaagtgctcctgcagggccatgatgtgggccagctcctggcacgggtgggtgatggtctccatgttgatgaccggcaccggcgagtacctggcgaagctgttgaggacgatgtcctggcggtcgtaggcccagtcgatgaacttggggaacgcacgcacggcgatgatgtcgcagtagcgacccagcaccttggccacttcagcgatgtgctcttcggtatcgccgtccatcaccgtgccgaggttgaactcgatcggccacgcatccttgcccggctgcagcaccaccgcgtgggcaccgagctggaacgcgcccagttcgaagctggtgcgggtgcgcatggacgggttgaagaacaccagcgcgatcgacttgcccttgagctggtcgccgagcttgttgcgcttgaacagcgccgcctgggtcaacagcgcgtcgagatcgctgcggctccagtcctgggtgttcaggaagtgcttgggggacatcatctttccttgcgtggcggcgccggtttcgacgcggtggaagggaaaacaggaatcaaaggtggagcgggaaggttgcagttgcagctttcagaagatgcatatttgaagcgcggaaacgaaaaaacccagccggcgggctgggttttttcggacgaacagcaaaaagctccggttacccagcgaggatgtggggttccggtcgacgcgcacgcgaggtcatgcccgacgcctgtcgggctgcgctgctgtcgtgctggaagtcggtgagcttcatggtcaaccatctttgcatgcggccgaggccggcgcaagggccggggtcccagaatcagggattgctggccgtgccctgctccgggccgacccagggcgtgatcgacacccggatcttgagccggttgccggggtcttccggcagccgcgaacggtacttggtgcccttgtagacgtaatccacgtcgtaggcgatgggccggcggaattcacgccccaccggcacgatgcggcagtcgcgggtcagcatcgggccagtgttggccggtgccggggccggcgtctcggctccgggctcctcaacggcctcttcgtcgctgcgcttgaacatcgagcgcaccgagtcccagaagcggctgatccggcccttgtcctcgaccggctcctcgccggtcacgttcaccggggccagggtccgggtcgacaccggctcgcagtgctcctcggtgcgggtcgcgcgcagggtctggaacaccggctccacgttcagcacctgggcgtagtcgaacttcacgttctcaacgatcaccacccggttgcggggctcggcctcctgcgccagcaccacggcgggcagcgccgacaggcaggccagggtcagcaacgcggtggatttcattggcgacgggagcaaggacacggcaatagtgtaggcagtggcgagcgcaaggggctgaacattacccgtccacgccgctcctgcccaccccaccccgggtggccccggcgtccaccggtggcaacgggtgcccccaaagggggccgacacgttctaaaatcacaggcttgtcccccagccacagccccatgaccctgcgcctgcacaacaacctgactcgccagctcgaaccgttcaccccgctcgatccggcctgtccgaccctgtatgtgtgcggcccgacggtctacaactacgtgcacatcggcaacgcccgtggcccggtggtgttcggggtgctggccgacctgctgcggcgccgtttcggtggcctgcgctacgcgcgcaacatcaccgacgtggacgacaagatcaacaccgccgcgcgcgagcagggcgtaccgatcagcaccatcaccgacaggttcgccgccgcctaccgtgaggacatggccgcgctgggcgtggtgccgccggacatcgagccggaggtgaccgcgcacattccgcagatcatcaccatgatcgagcagctgatcgccaacgggcatgcctacgctgccgaaggccacgtgctgttcgcggtggccagcttcgatggctacggcaagctctcgcgccgcgatccggacgaaatgctggccggcgcccgtgtcgacgtggccccgtacaagcgtgatccgggtgatttcgtgctgtggaagccgtccagcgacgacctgcccggctgggcgtcgccctggggccgtggccgcccgggctggcacatcgagtgctcggcaatggccgccgcccacctgggcgagaccatcgacatccatgccggcggcgtcgacctgcagttcccgcaccacgagaacgagcttgcgcagagcgagtgcgcccacggcggcaagatcttcgcccgcttctggctgcacaacggcatgctcaacttcggcggcgccaagatgagcaagtcgctgggcaacatcgagcgcgtgcacgacctggtgcgccagcacccgccggaagcactgcgcctggccctgctgtcggcccactaccggcaaccgctggactggtccgatggcctgatcgaacagtcggtgcgcaccctggaccgcctgtacggcaccttgcgcgaactggcgtcagtcgaggcggtcgttgcgatcccggccacggtcgaagcgaccctggatgacgatctgaacaccccgcaggcactggccgaagtggcccgcatcgccgccgatgcgcgtcgtgccaccgatccggccgagcaggcgcgcctgaagggtgaactgctcggcgccggactggcactgggcctgctgcaggccgatccagcgcagtggttcggcactgcggccagcgacggcggcgacgatgcccgcatccagggcctgatcgatgagcgtgccgctgccaagaaggcgcgcgacttcgcccgttccgacgccatccgcgaccagctggccgccgaaggcatcgtgctggaagacaccccgcagggcgtacgctggtcgcgcaagcgcggctgacccgccctgccccgtggccggtacgccggccacgcccccaccgtagagactgttgtgaccgactccccgttcccgcttgaacccaccgccgccgaggcacaggccgccatcgccgaggaattcggcttcttcggcgactggtccgagcgctaccagtacctgatcgacctcggccgcaagctgccggccttcccggaagaatggaagaccgaagagcatcgcctgctcggctgccagtcgatggtctggatcgtgcccgaaggcaacgcgcagtcgctgcgcttccatgccatcagtgattcggcgattgtctccggcctgatcttcctggccctgcgtgtgtactccgggcgctcggcgcaggagatcctggctaccgagccgagctacatccaggacatcggcctggcccgccacctctcgccgacccgcagcaacggcgtggcggcgatgctggccttcatccgcgagaccgcgcaggcccagctgcagcgcgacccgtcgtgagcgagcctgccacagccgaagacagcgcgctgggcctgctgtcccggcccggtttcgccaggctgctggcgtaccgcatcttcgcgatgctgtcctaccaggtggtcgcggtcaccgtcggctggcacatctacgaagtcacccgcaatccgttctcgctgggcctgatcggcctggccgaggtgctgccgttcttctgcgtggcgccgttcgccggttacctggtggatcacctgccgcgccgccgcctgggcatggtcgcctgttgcggactgatcgccaccgcactggtattgaccagcgtggccatgggctggctgccgatcgacggcgtgtggccgatctacgcagccattgcgctgaccggcgtggtccgcgccttcctgtcgccgatctacaacgccctgttcgcccgcgtactggcccgtgaccagttcgcgcgtggcgccggcctgggcgcggtggtattccaggccggcatgatcgccggcccggcactgggcggcgtgctggtcggcttcggtggcaagggcctgtcctacgcggtggccaccgccttcgcgctggtggcgatggcctgtctggccacgctgaaagtggaggagccggtgcacaccggccctgccgcgccgatcttcaagagcatcgccgaaggcgcgcgcttcgtggtcggcaaccggatcatggtcggcgcgatggcgctggacatgttctcggtgctgctgggcggcgtggtggcgatgctgccggcgttcttgcacgaaatcctgcaccacggcccggaaggcctgggcatcctgcgcgcgatgccggcgctgggctcggtgtgcgtgggcctgtggctggcccgccacccgctgcaccgcaatgccggccgcgtgctgctgttcgcggtggccggcttcggcctgtgcgtgatcagcttcgggctgtcgcagcacttctggctgtcggcgctgatcctgctgttctacggcgccttcgatggcgtctcggtggtgatccgctcgaccatcctgcagctggccacgccggaagaaatgcgcggtcgcgtatcgtcgatcaacggcatcttcatcagttcgtccaacgagctgggcgcgttctatgccggcacgatggcgaagctgctcggcctggtaccggccgtggtgctgggcgggttcgcggtgctgagcgtggccgggatcaccgcgtggaagaacccgacgctgcggaagttgaatcttcgcgacctgcagtgagcctgtagagccgagcccatgctcggctgcgtatttccgtgcgcccacgcgccgatagcgggccatgcccggcgggctctttccgcgaccgcggtggggtgtcacgtttcttttcgcgcgaaaagaaacgtaaccaaagaaacgcgccgccatccgcgagccggcgctgcgcgccggtgccctgtgctcctcggtgaatcaggggacgacgcggagagccagccgaccagcagtcggctctacaggatagagccgcctcttcgcccctgattcccctgcggtgctcggctcgctacaaggcggactcaacagccgcgagcgcacgcatgaccgctcctgatagagccaagccatgcttggctgcctttgcttttgcttttgctcttccttgccctccggcttcggcctgagccgagcgtgggctcggctctacatcggacccacccgcaggctccacccgatacccggaaggcgctctacacagccaactcgaacccaacaaaaaacccggccgaagccgggttttctgcatgaccagacaacgatcaggaatcagtcgccctgctgcttctgcagatgctcccaacgctcctgggcatcgatggtgcgctcggcggtcaggcgcgcctccaggcgctccaggccgatttcttcgccggtgtcgacgcagtaaccgtagtcgcccgcttccaggcgcttcagggtgctgtcgatcttgccgatcagcttgcggtagcggtcgcgggtacgcagttccagcgagttctcggtctcgcgggtcgcgcgctcggcttcgtcgccgatgtcacgcacttcctcgcgcaggttctcgatggtctgcttggactcttccaccaggtccgcgcgccagttctgcaggcgctggcggaaatactcctgttgcagcgggctcatgtattcctcttccgaggacggcttgtagccagccggcaggatcgggcggccggtggcctcgtcggtcttgtattcgaccaccttgtacttgctgcgcggggccggtgctgccgagcgggcggcgacggccacggcaaccttgccgacagggcgcgacacggtcttcggggcggaatcggatttcacggcggttttggcaggcgatttcgaaacgggcacgggattcttggattgcggggccttcgaagcggcaggagcggcggccggggccggcttgggggccggttgggctgctgccactgccacggtcttggccgggacaggcttggccggagccggcttggcagcaggcttcggtgcggacttcactactggggccggggccggctttacggccggtgcggcaacattcttggcaaccttctttgcagcggcaggcgtggcgaccggcttggccgcagcgaccttctttgccgccggcttggcgaccggcttggctgcagccttcttcaccaccgccttcggcgccggcttggctgctgccttcttgaccaccggcttggcgacggtcttcttcaccggcgcagccttgctgacggcctttttcaccggcgccttcttgctggcagcggctggcttggccttggcgggcgcagcggccttcttcgccaccggcttggttgccttgaccggcgttttctttgcggtggccttcctggccgccggttgcgaggacgctgccttggtcgccggcttgctcgccggcttcttggcaacgggctttgccgccaacttcttcacaacaggcttggcggttttcttggcggccgttgcggccttctttgcagtttttttagcagccacgaaacgctcttccttggattccccggggcccgggaaagcgggcctttatagcctacccgacccgcagcagcaacctcggcaccctgctccattcagtcctggagccaaggcgcccaatgggcagtccgacgaacacggaccgccttgcgcggtacggaacctggccagcacccgacggtgctggtaccggtcgcaggccatcggcgacatgcgaccaacggcccatcctgcacaaatgcggccttcatgccaactggcataagatgactgggtgatctcgcgcctgctcatcgccctgctgcgctcctacaagcgcttcatcagccccttgctggggccccgctgccgtttcgtgccgagctgttctgaatacgcgatggacgcgatctcgcggcacggcccgctgcgcggcagctggctggctgcgcgcaggctgggccgctgccacccgttccatcccggcggcttcgaccccgtgcccgagtcccccaacgccccctcttgccgttgcacaggaaaacattgacatgtcctccaccctcatcaccaatgcccgcatggtcaacgaaggccgcaccttcgacggcgacctgcgcatcgagaacggccgcatcgcgcagatcggcaacgggctggcgccgcgcgacggcgagcaggtggtggacgcggccgggcgctggctgctcccgggcatgatcgatgaccaggtgcacttccgcgaaccgggcctgacccacaagggcgacatcgccagcgaatcggcggcggccgtggccggtggcctgaccagcttcatggacatgcccaacaccaacccgccgacgctggattcgaccatcctggaagccaagtacgagctcgcgcgcggccgcgcctgggccaactacggcttctaccacggcgccagcaatgacaacctggacgccatccgtgcgctggacccgaagaaggcgccgggcgtgaaggtgttcatgggtgcttcgaccggcaacatgctggtcgacaaccccgaaacgctggacgcgatcttccgcgaatgcccgaccccgatcatcacgcactgcgaagacacgccgatgatcgatgccaacctgaaggccttccaggaaaagtacggcgatgcgctgaccccggacatgcacccggacatccgctcgcgcgaagcctgcatcaagtcgacccgcctggcgatgtcgctggcgcgcaaacacggcacccgcctgcacgtgctgcacatctccaccgccgatgaactggcgctgttcgagaagggcccgctgatccgcgccgatggcagccgcaagcagatcaccgctgaaacctgcgtgcacttcctgcacttcgcgcgcccggactatgcgaccaagggcaacctgatcaagtgcaacccggccatcaaggaagtgtccgaccgcgaggcgatcaccgctgcgctggccgacgacgtgctggacgtgctggctaccgaccacgcgccgcacacctgggaagagaagcagaagccctacgcgcaggccccctccggcctgccactggtgcagtacgcgctggtggccgcgctggagcgcgtgcacgaaggcaagctgacccgcgagcaggtggtgcagaagttcgcccacgccccggcgcagctgttcgacgtggaagaacgtggtttcctgcgcgaaggctacttcgccgatctggtcctggtcgaagacgtgccgttcacggtcaagcgcgaggacgtgctgtccaagtgcggctggtcgccgtttgagggcaccaccttccgttcgcgcgtcgcctccacctgggtcaacggccagctggtgtgggacggcagcaacctggtgggcgaacccgccggccagcgcatgacctacgaccgctgatgcgctcggcacttctgatcgggtcgctgctggccgcgcccctgttttccgtacccgcggcgcaggcgcaggatggcattggcagcctgatcgacagccgcgtggtgttcccggccagtgcgtcgcagggcgcactggtgatcggcaaggttcccgccggcagccgcgtgcagtacgccggtcgccagctgcgggtgagcggctacggcagcgtggtgttcggcatcggccgtgacgagaagggcccgctgcgcgtgcaggtgcagcgccccgatggtggcagcgagaccgcgaccattgcggtgacgccgcgcgactggcccacagagcgggtcaatggtgtgccgccgaagacggtcaacccgccgccggcaattgccgagcggatcaagcgcgaacaggcgcaggtgactgccgcacgcgcccgcgatgacgaccgtaccgacttcacccagaccttcatctggccggtgcagggccgcatcagcggccgcttcggcaatgcccgcgtgtacaacggccagcccggtgccggtcattccggcatggacatcgcggtgccgaccggcacgccggtgaaagcaccggccgccggcatcgtcaccttcgccggcccggacctgtacctgaccggcggcacgttgctgctcgaccacggcttcggggtcagctccaacttcctgcacctctcgcgcatcgacgtaaaggtcggcgaccgggttgaacagggccaggtgatcgctgcggtcggcgccaccggccgtgccaccggcccgcacctgcactggggcatgaactggttcgagacccgtatcgacccgctgctggtgctggagcgcaagtaacggtagtgccggccgctggccggcaacctcatcctcttccgcgccctgctggatgccggccagcggccggcactaccaggtacgttggatcaaccgcgcgcggcccaccacacgcgcagcagggtgcgcaccggggtggcctcgatcggcttgcctgcggcctgtgccgccacccgcgcacgcgccaggctggaccacacacggcgcgggcgcgggccgggcacgcgggtgccccaccccttcaacagatgctgcgcccagcgctgtgcggcattgctggcgtcctcgtccagcaggctgcgcggcacacccgccacgccagcgtcctgcaggcgctgcgccaaggtctgcagctgcaccgcacgaccggcgccggtgcgcggcttgtcagcgaacaaggccgcctccaccgcggctacggcctcggcgtagttcgccagcgcgcgcccggcgccggccgcatccagcgcgaccgtgcgcgcttcaaccagatccggaagtgcttcggccaactgggcccatggcgcacgcaccggctccagcagcctgcccagcggatggcgcgagcgatgtcccgcccagctgcgcagctcctcgccccaccacgccagcttggcgtcggccggcagcggatcgccgctggtgttgagcatgtcgtcgaactcctgcagcagcgcgaaccacgccactgcaagctcgcgttgcgattcggccacgaacggggcggccaccgaccattccggccaacggctgcgccacttgtcgaggaaactgtccagcgcggtactgctcactacaccattccttacggctgggccggggctgccggccgggtcggccagagactggccagttgcagaagttcagcgttctcgaccagcacgtcggcctgccaggccagcggatcgtcgctgtgcaggcggtagccccacagggctgccaccgacggcatggccgcggcccgcgcggcgatgatgtcgcgctcgtcgtcacccacgtacacacagtcttcggcggcaacgccaatggcctgcgcagcgtgcagcagcggcagcgggtgaggtttgcgctcggccaggctgtcaccgccgaccagcactgcacagcgctgctgccagccgtgctgcggcaggatcagccgcgccaggtactcgggcttgttggtgacgatgccccacacggtgccggcgtcatccagcgcggcaagcatgccggccacgccatcgaacagcaccgcgtgctggccgatcagcgcttcgtagcgctgcaggaattccggaatcagtgcatctcgcgcagcggcatccaggtccgggaaagcggccccgaccatcgcgcgcgagcccttggagaccaccgggcgcagcaccgccggatcgatcggcgcacgaccacgctcggccagcatcgcgttgcaggtggcgacgaagtccggcgcgctgtccagcagggtgccgtccaggtcgaacagcaccgcacgcgggaagcgggcggcggtcatgccggcttgaccgcgtaggccaggtagttgatgtcggtgcggctgctcaggcgggcatggttgcgccacggctcgtaggccatgccgctgacatccaccagctgcaggtcggcctcgcgcagccagcgcgccagctcggccggcttgatgaattcctggtagtggtgcgtgcccttgggcagcaggcgcgccacgtactcggcgccgacgatcgccaccgcgaacgcggcggcggtgcggttgatggtcgacaggaacaggtggccgcccggcttcagcaggcgcttgcaggcctcgatgatcgcgcccgggtccggcacgtgctccagcatttccatgcaggtgaccacgtcgaagctgcccggctgctcggcggccagatcctcggccgcctgcacccggtaatcgacctgggcgccgctttccagcgcatgcaggcgcgcgaccttgaccagctccggggccaggtcgatggcggtgacgtcagcaccggcctgggccagcgcttcgctcaacaggccgccaccgcagccgatgtcgagcacgcgggcgccgcgcagcggcacgcggtcagccacgtactgcaggcgcaccggattcagcgcatgcagcggcttctgcgggccgtcagcgtcccaccagcggttggccagcgcagcgaacttgtccagctcggcctgatcgaaatttgaggaagcgtggggggcagtcatgggggatgtccttgcggcgccagggttcaggcgcggatatggcggatgcgctcgcgccactggcgcgcgttggcgatgatgcccggcaggtccatgccgaccagctcgcgctgcaccagcttcggcttgccggcgatccagacatcgctgacctgctggcggccggtggcgtacaccagctgcgacagcacgttgtgcagcggctgtgtttccagcgcggacagatcaacgcagaccaggtcggcctgcttgccgacttcgatcgagccgatgcggtcgccgaagcccagcgcgcgtgcgccacccagcgtggacgcgcgcagcgtggttgccgcgtccagtgcagtggcgtcgtcggccacggccttggccaggatcgccgcggtgcggttctcgctgaacatgtccaggtcgttgttgctggcgcagccatcggtaccgatcgccaggttcacgcctgcgcgctgcagggcgcaggccgggcagaaaccggaggccagcttcaggttggattccgggcaatgcaccacgctgacgccacgttcggcgcacaggtggatttccgcatcggtcagctgggtcatgtgcaccgcgatcaggcggtcgttgaccaggccgagccgatccagccgcgccagcgggcgctggccgtgcagcctgatcgaatcgttgatttcctgcgcggtctcgtgggtatgcaggtgcacctgcatgtcgagctggtcggacagcatccgcacccgctcgaagttggcatcgttgaccgtgtaaggcgcatgcggcgcgaacgcggtgccgatcagcggatcggtgcgccactggtcgtgcagttcaccggccttggcgaagtactcgtcgtcggtcttggcccaggcggtggggaaatcgatgatgaccgcgcccaccagcgcgcggaaaccgtgtttcttgtagaccgcggcctgcacgtcgccgaagaagtagttctcgttggcgcaggtggtgccgccgcgcagcatttcggcgatggccagggtggtgccgtcggcaacgaactcggggccgatcaccgccgcttccaccggccagatgtgctgctgcagccaggtcatcagcggcaggtcgtcggcaacgccgcgcagcagggtcatcgggttgtgcgtgtgcgcgttgaccaggcccggcatcagcgcagcctcgggtcggctcaccacctgggtggcgcggaagcgtgcgcgcgcctcggcacgcggcaggatggccacgatctcgctgccacgcacggcaacggcatggtcttccagcaccaccgcatgcggctcgatcggaacgacgtaaccggcttcgatgagcaggtcgcaggcttcggggaggtgcgggctatcgctcatgcgggctcactggctgtgggggcggcgagatacttctgggggacacgcccctgagtcaggggctgccgcgaagcggcggggtctggagacccgtgaagcggggcccatgatctgccgaagcagatcatgggagcgccagcgcgaatgtgctggcgcgtacccggccagcggccggcactaccgcaaggtcggcctatggccggaaccttacttgacgcgtgcggagtattcgcccgaacgggtgtcgacgcggatcacttcgtcctggttgacgaacagcggcacgcggaccacggcgccggtttccagggtggccggcttgccgccgccgcccgaggtgtcgccacggacgcccggatcggtttcggtgatcttcagttcgacgaagttcggcggctgcacgaagatcggctcaccgttccacagggtgaccacgcaggactcttcgcccttcagccacttttcggcgccgcccatgccggccttggtggcctggacctgctcgaaggattccgggtccatgaagtgccagtactcaccgtcgctgtacatgaagttcatgtcggtatcgacgacgtcggctgcatccagcgagtcggtcgacttcatggtcacttcctgggtacggccgtccttgatcaggcggtacttcacgcgggtgaaggcctggcccttgcccggcttgacgtattcggtgtcgatgatgacggccggttggttgttgaccaggatcttcatcccgttcttgacgtcgttcatgccgtagctggccatgcgtaaactcctgagtggcaaaaacgccgcgggtgcggcgagccgttagaatggaaagcccaccgggtgccggtgggcgactgtttttctgcccccatgataaccgcaggccccctctccatgcagctttccgccttcccccggccccagtcgccaggcgcgcccgcgcgctggcagcagctctggcgccaggcgctgcgcgacccgcacgccctgctggcccggctgcagctggacccggccgcgctgggtgtctcggaggcggccattgcccagttcgcgctgcgcgtgccggagggcttcgtggcgcgcatgcgcgtgggcgacgcggccgacccgctgctgcgccaggtgctgcccgtcgacgaggaaatgcgcccggcacccgggttcagtttcgatgcggtgggtgatggtgccgccaggaaggccaccggcgtcatccagaagtaccgtggacgcgccctgctggtcgccaccggcagttgcgcgatcaactgccgctactgcttccgccgccacttcgactatgccgcggaaaacgccgccaagggcggctggcaggaggccgtagcggccatcgcggccgacccggacatcgacgaggtcatcctgtccggcggcgacccgctgtcactggccacgcacaagctggccgagctgaccgatgcgctgcgcgcgatcccgcacatccgccgcctgcgcatccacacccggctgccgatcgtgctgccggagcgcgtggacgaggagctgctggcctggctgggcagcctgccgtggccactggcgatcgtggtccacgccaaccatgccaatgagttcgacgccagcgtggacgctgcgatgagccgcctgcgcggcgtcggcgcccagctgctgaaccaggccgtcctgctgcgcggggtcaacgacagcgtgcaggccctgcaggacctgagcgagcgcagcttcgccgccggcgtgctgccctattacctgcaccagctggaccgggtcgagggcgtggcccacttcgaagtggacgacagccaggccaaggcgctgattgccggcctgaccgcacgcctgtccggctacctgattcccaagctggtgcgcgaactgcccggcgacccgagcaagcgcccgctgtaattccgcagggggtcagatccctttttcctgcggaaaagggatctgaccccgacacaacaaccgtcggtcagagacccgattcgatcatccgcaccacttcggtggcagtcaccgggtggctcagccagtagccctggccaagatcgcagccgcgctgcaccagcagttcgaactgcgcctgctgctcgatgccttcggccaccaccgtgatgcccagcgcgtgggccatggcgatgatggccgtggtcagtgccagatcgtcgggatcgcgctgcatgtcggccacgaaactcttgtcgatcttcacgccgtccaccggcacctggcgcaggtggctgagaccggagaagcccgttccgaaatcatccagccagaccttcacgccggtgcggtgcagcttgtccagcagctgcgcggcaaccatctcgtcgccgatcactgcggtttcggtcagctccaggtgcaggcgcgaggccggtagcccggactcatgcaggcactgtgcaaccagcgccggcagctcgccgccgcgcagctgccgcggtgatacgttcaccgacacgaacagatcgtcgccgccggcaccccgtggccactgcgaggcttccatgcaggccgcacgcagcaccttcgggccgatgatctcgatcagcccgctctgctcggccacttcgatgaacaccgacggcggaatcgtacccagggtcggatgctgccagcgcagcagcacttcgacgccgaccatgcggcggtcgcgcatgcggaagatcggctggtaggccaggcgcagctcgccgcgctcccaggccccgcgcagttcctgctccatgtgcacgcggcgctcgaccgcatggtccatcgcccggctgtaatggcggtagcagttcttgccggccatcttcgcctggtacatggcgatgtcgccgttcttcagcagcgtggtcgcatcggcggcatcgtccgggaacagggtcacgccgatcgaggtccccaggaacagctccctgccctgtaccaccagcggcttgcccagttcgcgcaccagcacctcggccagcagccgggcgttcgcggccacgtcgccatcgccgaccaggatcacgaactcgtcgccgccgaagcgggccagcagcgcctcatcgcctcccgcttcggcaaccgcgcgcccgatgcgctgtgcgaactgcaacagcgcttcgtcaccggcctcatggccaagggtatcgttgacgcgcttgaagtcgtcgatatcggcgaacagcaggcccagccgatgattggatgcgcgcgccgccatcaggcgatggtccagtgcttcccggaacgccagccggttggtcaacccggtcagcgcatcggtataggccatgcgccgcacctcgcggtcatggcgggcgatggaatcgcgcatccgggcaaagccgcgcaccagctcgccgacctcgtcattgcgggtgttctcggccagcggcgcctggtagtcgccagcctcgatgcggcgtgccgcagcggccaggtcccggatcggcgccaccagggtgcgctgcacgtacaggatcaccgccacgccgatcaccaccagcaggcccagcatcagcagcagccagcccaggtggcggctgccgacctgctgcaggcgctcgccgagcgtggcattggctgcctgttcgcgctgctgcacctcgtccagcgccatgccgacgcggacgccgccgatgcgctggttgccgaccatgatcggcatggtgttgtcgagcaccttgggcgattcctgcaccaccagcgcctgcgccaccgcggccttgggagcgagcgggtcggccatcggctggccgaagccggacacctcgatcgagccgtcatgcaccagccggccacggtcgtcgaacaccagcacatagcgcacgaccggctgccgtgcggtgctgcgcaccagcgcaccgacctggtccaggtcgcggtagtacaacgggttggccagcgcgtcggacagctcgcgcgccatcgcttcgccgcggctgcgcacgctgcggtcgaacagttcatggatgacgccaccactgaggttgcgcacctcgccctgcatcgccgcctgccgccccagcaacactgccaggatcgccaccaccacgaccatcgccccgcccatcgcgagcaggaaccgggcctgcattcccgagccgagccacttcattccacttccatccgcacgcgcgtcaatccttgtttcaattcatccagccgctgctgcgcatgcgcatcgacgcggtggaaaccggaagtaccgaaaaaccgatgcaacgccccctgcgcctgcgggtcactggccgcctgcagcaggacgtcctgcagccggtcacgcacccgcgggtcgaggtcggcgcgcaccatctccaccgcccgcgggtagggcctggtgcgcagcagctcgcggaagtcgcgccggaatgccgccggcatccttcgctcgtcgttccagcccacgctgctcaccgccccagcgtcaaccacgcccttgtgcacgaacgtagcgatgttcaactcgctgcgcgcgaacacataccccacactgtcccggcccggcatgtcccatacgccggccaggatctgcggcgccagcccctcctgcagcagcgtcatcaccggcaccaggtaggcactggtggacgccgtgttctgcaacgccaggcgatgcccacgcatatcctggatgcgctggaccggactgtcgcggcgcacgaagaacacggtctggtactcacgcacgccattgcgctcggtcagcaacaacggccgcgcgccactgcgctggccgagtgccaccgccgtacccgacgtttccgtgacccagtcgacccgcccccgccgcagatagctggccatctgctgcgggtcgcgcgccatcaggatccgcccctccttgatgccgacgtcatgcatgcgtgccaccacatagtccagcaacggctgcagctgctcgtaatgggccttgggatcatcgctgatccggcccagcaccagcaccgggtccggtgctgcatgcaccgtcccggccagcaggatcatgaccaggctcagcagtcccctctgcactgcccttcgcagacccgacacaggcttcatcccccctgggtatccggacagactacccgaaaaaatgagaacgtcgtcagctgtccttgttgcccgcttgtgccagtcgcgccatgcgctgggtgtcggccaggatgccgcgcaacaggcgcacttcctgctcgctcggctcgctgcgcaggaacaggcggcgcagcttgcgcatcgctgattccggtgcgcggcccttgtggaaatcgatctcgtccaaggtgtcgccgagctgggcgaagaagctctccatctgctcatggctggcggcctgttcgcggaaacccggctcggcgtcggcggccggctgcgcgcccagcagctgcatgcgcgtttcataggccagcacctgcaccgcagctgccaggttgagcgagctgaacgccgggtcggatggaatatgcaccgccgcatggcagagctgcagttcctcgttggtcagcccggtgcgctcgcgaccgaacaccagcgccacctcggcgccctcgcccgccttggccaccgcacgggcggcggcatcggccggcaggtactcctccagctggacgcggcgggcacgggcggtgcagcccagcaccagtcggcaatcggccacggcctcggccagggtggccaccaccggggcgtcccccagcacgtcttcggcaccggccgagcggcggaaagcctcctcgtccagcggtttttcgggggcgaccagcaccaggcgggccaggcccatggtcttcagggcacgggcggcagcgcccatgttgccggggtgctgggtaccgaccaggacgaatcggaggcgggtggcggcgggaaactgggacatgaacagggaaaaggtcgagctggacgatgaccaatggtaaactgtgcggccggccactgcgccggacccgctcttttcccccgccagtccatctcttctgcctttccgggagcccacgccatgcagaaacccgccgtcaccgtcatggtcaaggccgcccgcctcgccggcaacgtcctgttgcgcaacatcaacaagctcgaggcactgaacgtggtgcagaagggccggatggactacgccagcgaagtggatgcggacgcggaaaaggtcatcgtcaaggaactcaagcgcgcttacccggactacggcatcttcggcgaagagggtggcgtgcagggcgagcgccgccagatgtgggtcatcgacccgctggacggcaccagcaattacctgcgcggcgtgccgcactactgcgtgtcgatcgctctggtcgagaatggcgaaccgaccgatgcggtcatcttcgacccgctgcgcaatgaactgttcaccgcaagccgtggcgctggcgccgtgctgaacgaccgccgcatccgcgtggccgatcgcaaggacctggaaggcacgatgatccacaccggcttcgcgccgcgcgagcgcagccgtgccagcgcccagctgaaggcggttgacgccctgctggtgcacggcgaggacatccgccgcaccggctcggccgcactggacctggcctacgtggcctgcggccgcgccgacgcctacttcgaagccggcgtgaaggcgtgggacatcgccgccggcctgctgctggtccgcgaggcgggtggcaaggtctgcgacttcaagggcgcgaccctgggccgcatggacaaccgtggcccggagacccaccagatcgtggccggcaacctgaaggtggccgagtcgctgcagaaggtgctggtcaacaccggttatgcggcggagttcgacgcgaagttctgaggtttcgcgtaaagcgcttcatggagacggcacctgcgtaggtgccgttttcgtttgtgcgcacggagagtcgtttccgcgaccgcggaggggtgtcactttctttgctcgtgcaaagaaagtaaccaaagaaacacgccgccagggcgcgagccgatgctacgcatcggtaccctgcgctcctcggcccgtcgagggacggtgcgggaactcgctgcgctcagacacccgcacctcttcgccctcgccggacctgcggtgctcggctcgctcaaggcggacccaaggtcaaatgccacagctgcacccagtaaatccacgccacgtgtggatgctgttgttcttgatcttgatcttgatcttccagtccgccttgagcgagccgagcatcgcaggggaatcaggggcgaagaggcgccggtgtctgagcgcagcgagttcggcgccgtcccctgattcgccgagaagcacagggaaccgtcgcgcagcgacggctcgcgccccggcggcgtgtttctttggttactttctttgcacgagcaaagaaagtgacacctccccgcaggcgcggaaacgatccgccgggcacgatccggcatcagcaatgcatcgcgcaaacaaaaacgcccggcgcggggccaggcgttcctgcactaccgtggagcggtggcttacgccgccgtcgacgcccgcagcgcggcgatgcgctcttccagcggcggatggctcatgaacagcttcttggccgtcgaaccggaaatgccgaaggcggcaatctgggtcggcagcgtgctctggccgtggttgagctgcaggcgctccagcgcggcgatcatcttctggcggcccgccagcgaggcaccacccgcatcggcacggaactcgcgatggcgcgagaaccacatcgagatcatcgtggcgaacaggccgaacaccatctccagcacgaacacgatgatgtagtaggcgaagccgcggccgccgccttcgcggttgcccgacagcgcgctgtcgatgatgccgccgaccacgcgggccagcacgatcacgaaggtgttcaacacgccctgcagcagtgccatggtgatcatgtcaccgttggcgacgtgggcgatctcgtggcccagcaccgcttcggcctcgtcttcactcatgttgtgcagcaggccggtggacaccgccaccagcgcgttgttgcggttggcaccggtggcgaaggcattgatctccgggccgtcatagaccgccacctcgggcatgccgatgccggccgccttggcctgccgctcgacggtggccagcagccagcgctcggtctggttgcgcggctcggtgatcaccaccgcaccggtggagcgcttggccatccacttggacagcagcagcgagatgaaggagccaccgaagccgaagatcgcggccatgaccagcaggccactcatctggctcggattgacccccagcaacgacatcacgatgctggcgaggatcaggaccgcgaagttggtcgccaagaacagggcaatgcgggtaaacatgggaaaatccggctcggaaggggtcgataccagtcaatttgcggtgtggtcagcttgaattcaagcgccaacctgaccgacgattcagccagcatgacctcccccatttcctgcggccgcttcgcgccctcgccgaccggcctgctccaccccggatccctgcttgccgccttcggcagctggctgctcgcccgccatcacggcggcctgtggcggctgcgcattgaagacgtcgatccgccgcgcacggtgcctggcgccgcggaggcacaactgcaggcgctggccgccttcggcctcacccatgacggcccggtcctgtggcagagcgcgcgcggggaggcctaccaggccgcgctcgacgtgctgctggccagcgatctggcctttgtctgccactgcagccgcagcgaactggccgccagcggcggcatccaccaccgctgcgttgcgcgacagccacgaccggaccctgccgtccgcttccgcgtgccacgcggcagcatcgtgcacttcaatgatggcctgcgcgggccgcagcaccaggacgtgcatgccgaggttggcgacttcgtgctgcgccgtgcagatggctgctgggcctaccagttggccgtggtggtcgatgacgccgaacagggcgtgaccgaagtggtgcgcggcgccgacctgctcgattccaccgcgcggcagatcctgctgcagcaggcgctgggcctggccgtgccacgctactggcacctgccgctgctgctcgatgcaccggggcacaaactgtccaagtcgctggcgtcgctgccggtggacagcacgcggccggtgccggtattgcgcgcgctctggcagctgctgggccaggcgcctgccgcactggacggcgccgatgaccgggatgcgctgctggaggctgcgcaacgggcgttcgacccggcgcggctgccgcggaccgacatcctgttgccggccggcgcactttccgcgccgatgttgcagaatcccccttcccccacctgatacccggacagcactccatgacatctcgcgtcgcactggtcaccggcggaaccggcggcatcggtaccgccatctgccaacgcctggccgaccagggccaccgggtcgccaccaactaccgcgacgaggccaaggcccgcgcctggcagcaggcgatgaccgagcgcggctaccacgtggcgatcttcccgggcgatgtctccgatccggacagcgccgaagcactcgtgcgcgccgtcgaggccgagctgggcccggtcgagatcctggtcaacaacgccggcatcacccgtgacaccaccttccaccgcatgcgcgcggaccagtggcacgatgtgatcaacaccaatctcaactcggtgttcaacgtcacccggccggtcatcgagggcatgcgccgccgcggctggggccgggtcatccagatcagctcgatcaacggcctgaagggccagtacggccaggccaactacgctgcggccaaggccggcatgcacggcttcaccatctcgctggcccgcgagaacgccggcttcggcatcactgtcaacaccatttcgcccggctacgtcgccaccgacatggtgatggcggttccggaggacgtgcgcgccaagatcatcgccgacatcccgaccggacgcctcggcaagccggaagaaatcgcctatggcgtgtccttccttgtggccgaggaagcctcgtggatcaccggcagcaacctggacatcaacggcggccaccacatgggctggtgagccgcgcaggggggcgccgcggcatgcaccggcggcccctgccgatggtcatgctgcgcagcacgcaaccccttgttgcgcaacatgatcgcccctgaaagccaagcctggcgggggctggagcggttgcaaccgctgctgcactgcgccatgctgcgcgtctactgtgacgagtaccgcttcatggctgcgacccgcatcatcaagaagtatccgaaccgccgtctctacgacaccgagatctccagctacatcaccatcgaggacgtgcgccagctgatcctggacggtgaagacttcgaagtccgcgacgccaagagcggcgacgacctcactcgatcggtcctgctgcagatcatcgccgaccaggaacaggacggcgagccgatgctgtccacccagctgctgagccagctgatccgcttctacggcgattccctgcagggcttcatgggcaactatctggagcgcagcatgcaggtcttcctcgaccagcagcagcagttccgccagcagatgggcaacctgctgggccagaccccgtgggcgatgatgaaccagctgaccgagcgcaacctggagttgtggcaggaattccagcgcagcatgggcagcggtttcggtggcccgcgccccggcggtaccggaacgggaaccggcaccggcaacaagcccggcgaaccgggcaccggcaccggcggcaagacccgccgctgaacggcagctacggctgatacgaaaacggcgcgcccctggcgcgccgttctgtttggcatcgcgccaacgatgcgtcagcgtttcgccttgcaccccgtgcacacgcgctcgaccttgtagcccttggccttcagcttctcgaccacgccatcactgcccagcaggtgcagcgtgccgaccaccaccagcgtaccgccctgcccggcctgcaggtacggctgcagcttcggcacccaggcatcgttgcgcccggtgttgatgcgctggtacagctgcggatactgctggcgcatctccgccgccatcttggtccacagcaggcgctcgtcgccgcgacgccatgcatcatgcagcagccgcgcctgctcatcggccttgccggcctggtccagcgcttcggccagcatctgccgctgctcctgcaccgtcatcccgtcaagcatgccgatctgggtatcgatgtcctccaggcccgccgtcttgcggccggtcttctgcgcacgctccatgaagtggcggtccaggcccagcgccgggtccaggcccagcttctgcatctgcccgaccgaaatgctcaggccgacaaaccaggccttcatgccctgcatctgcgccagcggcagctggttctgggcagcaaaggcctgcagcttctgccaggtcggcgcatccagatcacgcttcagctcgctgccatcggtgcgggtcgcggcctgcaccatgcggctcgccagctgcggcgactgcatgtcttccggcgacagctcgaacaccacccgctgcgaggcctcgaacgcctgctcgacatcgggcgacagcgggtagtcctgcggcttcagcaggtggaacgaccccagcaggtagacgcgtgcatcgcccgggccggtgactttccacaacagcggtacgggcggcttggccgccgcggcggtcgcggccgcagccgtggtgcccggcgcatcgcggccagtggccaagggtgccatcgcgcacgccgccatcagcagcgcggcacggaacaggtgtttgatcggcatggtcagccttctccttcaggcaggtggtacgccttctcgcccgcttccacgcgcaggtccagccggttttccggtggcgccagcggacaggtggcgtaggcggtgaacgcgcacggcgggttgtaggcatggttgaaatcgatgcgcacggtgccgtctgcggcgggcgcatcggtatccaggtagcgaccggccggatagctgccgcggccgctggtgcggtcggcgaagatcaggaacagcggctgcccgggcgcaccgatcgcttccagccgccagctgcggccatcgcgttcgaactcgaccgcgccggcattgggcatctcggtggtcaggccggtgatgtcgacgatcggcagggtcttgcccggcgggtgcgcgatgaagcgcgcctgcacctgccagtccacgccgcccggccagtactgcaggccggcgaagtcacgccgcgcaggcgcatcggcatgcttgacccgcaacgcgtcccgcggcccccggcggatgatgctgagctggcccttgccgccatcgaaggccagcagcgtcggttgcgcgtccttgtctgtgtcaacgcggatgcggccgcgcaccggcaggccatcatgactgacatcgacaccggcttcaggcgtgaaccaccactgcgtcccttcgcgacgcagcaggcccagcttgtccgggccaaccgtcaggcggatgccgttggtagcgccgctgccaacgaaatgcgatttgttctgcagccagtgcaggcccaccagcgccgtccagccatcgggccgggtcaggtcctggtagcgcgctacacgccattgctgctgcgcggccgcgtaggccggatcttcagcggccgtcggcaccggcggtgttgccgggctgcaggcggccaacaccacggcggccagcaggcccgccattccccgataacgcatcgatgctcccctcaacgtccgcgcaggaaccagcggtcgatctccgccagcgaaaaacgggcccaggtcggtcggccgtggttgcactggccggaccgttcggtgatttccatgtcgcgcagcagcgcgttcatttccggcagggtcaagcgccggttggcacgcaccgcgccgtggcaggccatggtcgacagcagttcgtcgcgtgcactggccacgcggcggctctggccatgctcgcgcaggtcggtcagcacgtcgcgcagcagcccttccggttcggcatgcgccaacaatgccggaatactgcgcacgtgcagcgaaccggggccggcacgggtcacctcgaagccgagcgccgccagggtttcagcttcgctctcggcggtgtcggcctcgcgctcgcccactgccagcgtgatcggcaccagcaacggctgcgactgcaggccgatgccatcgtgcgcgttcttcaggcgctcgtagccgatgcgttcgtgggccgcatgcatgtcgaccacgatcaggccttcggcgttctcggccaggatgtagatgccatgcagctgcgcgatcgcatagcccagcggcggcacgcctgcgtcggcactggtgaccggcagtccgttctcggtcggcatcggcggcagcgcagcaccgcgctcggcgccggccggtgcggcatacagcgcggcataagcagccggtgcatcggccacctgcaggcccagcggctgctgcgggcgccatccggagaatccgccaccaccacctcccgagccggcacccggcgcgggcccacgcaccagcccgaatcccgacgcgcctgcgctcgatgccatcggcatggccgtggcatccaccggctgcgcagcaccggcaccgatctcctgcgccgacatgccggcgcgggtatcggccagcgcatccttcagcgtgcggtagacgaaatcatggaccagccgcgaatcacggaagcgcacttcgtgcttggcagggtgcacgttgacgtcgacgcgggtcggatccagttccaggaacagcacataggccggctggcggccgtggtacagcacatcgccgtaggccatcttcactgcgtgggcgacgctgcggtcacgcaccgagcgaccgttgacgtacaggtactgctggtcggcgctcgcgcgcgaataatgcggctgcgcgatccagccatgcaggcgcagtccggcaccgctgtggtccacgcgcacggcctggttggcgaaatcctcgcccagcgtttcggcaaggcgtgtatcggaatacagatcgcccggcttgtaacgacgcgaggccttgccgttgtgcgacacgcgcagctcgacatccggccgtgccagcgccagcgaacgcagccactcttcgatatggcccagttcggtgcgctcggcgcgcaggaacttgcgccgcgccggcacgttgtagaacagctcgcgcacttccaccgtggtgcccggcgcgtgcgcgcgcggggtcacctcgccgatcttgccgccttcgatctgcaacgccgaaccgtgctcgtcatgcgcgcggcgcgaggccagggtgaagcggctgaccgaggcgatcgaaggcagcgcttcaccgcggaaccccagcgttgccaccgattccagatcgtccaggtcggcgatcttgctggtggcgtggcgcgataccgccagcggcagctgctccgctgcgatgccgctgccattgtcacggatgcggatcaggcgcacaccgccctcttccagatcgatgtcgacacggttggcgccggcatcgatcgcgttctcgaccagttccttgaccaccgacgcgggccgttcgaccacttcgccagcggcgatctggttgatgaggatctccggcaacggccggatcgggcgcggaccgggcgcgctcatgggaggtgatgggcagcagacttcatgggtcgatgatagcggagctgccgaggatagagtcgagccatgctcgactgcgggctaccgacaaggcccagtcgagcgcggctcgactctacggaaagcagtaacccgccttcggcggcttacttgctgccgccggccatggtgccggccgcgtcgatctcggcctgggcgcgggccgcatacaacgtccccggcggcggctggcggctgaagaaggtgtgcaccccatccagcacggcgccagcgatcttgcgctggtacgccgggtccatcaggcggcgttcttcatccggattggagatgaacgcggtttccaccagcatcgccggcatgtccgaggtgcgcagcaccgcgaagttggcgcgctcgatgttcggcttgtggttgttgccgatccgcttcaggccgcccagcacgtggccggccgcgtcttcggatgccttcatgtagccgctctgcgccaggtccagcagcacgttggccagggtgccttcggtctgctgcaggcgcacgccaccgaccaggtcggccgcgttttccttgtccgccagccagcgggcgcgctgcgaagaggcgcccttggtcgacagcacgtagaccgatgagcccgtggccgagcggttttcggccgcgtcggcatggatcgagatgaagatgtccgccttgttcgcacgcgccttctgcgcacgcatcggcagcggaatgaacacgtcgctgtcgcgcgtcaggtaggccttcaggcccggcgtggcgttgacctggcgggccagctcgcgcgccactgccagagtgacatccttctcgcgcttgccggtcgggccgatcgcacccgggtcctggccgccgtggccgggatcgatcgccaccaccaggtggcgcatgccggcctgcatgcggatacgcgacgcatcgctgggcatgacaggacgcggcggttccaccggcgtcggtgccggtgtaggcacggtggccggcggcgtggtcaccaccgctgcggtgcgctggccggcgaggatcgcggccggcgaggacgacggcgtgctgctggcggtgacaccggccgcagcaacctgggccggcgcggtggtcggtgccggggtcggcgtggccggtgcggcggcagtggcgctggcctgctgctgtacctgtgcggtcagcagggccgtggcacgcgcggcatcggtgcgcgactgcgcgctctcggccggagtcggtactggtgcagctcccgccgcgggcgcctgcggccgcacggctggcgtcgccgccgggcggctgctggccacggccgggccatcgcccggccattcgatcaccagcttggattcattgccctcgcgctgcatctgcgggcggaacggcgccaccgattcggcgaggtcgaaaacgacgcggaacgtgcccgggaccggctgtccggtacgcaccgccgtgaccacgccctgcgcggccggcatcttcaggttgcgtatggcgctggagtcggggaaatcgaccaccaggcggttcgggccggccagcgacagggtcttgtagccgccactgccgaccagcgagatctcggcacgggtgccggtagcgccggtgttcagcaggacctgtcggacttcacccgcccacgcactgacgctcgccagacccagtccgacggcggcacagatggcgatgagacggttccccgggcgcatggctcaggattcaatcaccgcgctgaacggaatgcaacacctttttccttaataatccgtaacctgccggtctttgttctcgtcagccgacagaaatggcctgcaagtcgcccccttgcggcagccgttccagccattcacgtcctacgtcgctggccccagtgagacggacgcgtcgtccctgcccgtcgatctccagcgccaccaccaggtcggtcggcggcagcgcgccggcgccccgttccggccattcgaccagccacagcaccgcgctgccctcgtccaggccgaggaaatccagctcaccggcctggccgatgcgatacaggtccaggtgccacgcctcaccgccactggccagcggatagcgctcgaccagggtgtaggtggggctgcggatcgcgccctgcacgcccagcgcgcgcagcagcgcgcgggccgtggtggacttgccggcacccaggtcgccgcgcagttcgatcagcgcctgcggcggccgggtggccgccagccactgcccgagcagttcggtggcgtcgctgtcggcaaggaagaattcggtcatggggagaggtccgggttggccagtcgccgcagcggcgccagcagatcagtaggaagcaggccgcgcgcgccatcggcggcagctgcatcgcccgccagcgcatgcagcagcgcgcccgcggccgcggcatcgaaggccgcaaggccctgcgcgcgcaggctggcgatgatgccggtgagcaggtcgcccatgcctcccacggccatccctgggttaccggcagcgatcaaccggggcgtttgcccaggcgctgccacgatgctgccagcgcccttcagcaccaccacggcgtggaagcgctcggccaacatgtgcgcacaggtgtagcggtcggcctggatttcagccgtgctgcagccgagcaggcgcgcggcctcgcccgggtgcggtgtgagaatggcatcgggcaacgcgcgcggatcctgcgccagcaggttcagggcatcggcatcgaccaccaatggcttgttgctggccagcactcgcgcaaacaaggcgcgtgcccattcgtcctggcccagaccgggcccgatcgccaccaccttcgccttgtccagcagcgccggcagcacatcgccgtcttccagtgcatgggtcatggcctcgggcaaccgggccagcagtggaccgacgtggtcgcggcgggtgcccaggctcaacagccccgcacccgcgcgcaaggcggcttcggccgccatcgcgatggcaccgccgctgccatggttgccgccgacgcacagcacgtgcccggattcgcccttgtgggtattggcgcggcgcggtggcaacagggcccgcaaccgcacctgcgtccagtgctccgcagcgggtaccacgccttgccaggccgccgcgggcaacagcaggggtgccaggaccttctgcccgcaatgatccagcgcatcgccggaatacagcccgcgatgcgccacgatgaactgcagggtcagtgcagcgcgcactgctacgcccggcaccgccccacggtcggcatcgacgccactgggaacatccagcgccagcaccggcgcagtctgcgcgttgagcgcggtaatcaacgcctgcgccgtaccctccggcgcgcgatcaaagcccagcccgaacagggcatcgacccagacgtcggcctcgggcagcatgccgtcgaaatcggtgatggtgccgccgccggacctgaattcagatgctgcacgctgtgccagcgcggtcgagggcggcctgcccggcagggcgatcactgtcacctcgcgcccggcctgcagcgcgtgacgggccagcacatggccatcgcccccattgttgccagcgccgaccaccacgccgatccgccgcgcctgcggccaatgctgcagcaggcactgccaggcggcctggccggcctgcgccatcaggccccagccgccgtcggcggccaacgccgaggcctgggcatcaagcgcacgcgcggcagcggaatcgaacagatcggcaaggttggccatgcagggattttatactggtgcacatgtcccccgcccccacccctgtcgatccggtccaggccgtgcagcgcatccgcgaactggcgcgtgcgcatggcttccagcgctgcggcatcgctggtatcgaactgggcgaggatgaagcgcacctggccgactggctgggccagggcctgtacggcacgatggactggatggcgcgccacggcaccttgcgcgcgcgaccggccgagctgctgcccggcaccgtgcgcgtgatttcagtgggcatggactacagccacaaggacgacaccgaagcctgggcgaccctggccgacccgggccgcgcctacgtggcgcgctacgctctgggccgcgactatcacaagctgatgcgcaaccgcctgcagaagctggcgacgcagatcaacgatgaagtagcgccactgggctaccgcgtgttcgtcgattccgcccccgtgctggaacgcgcactggcgcgcaacgccggcctcggctggatcggcaagcacacctgcctgatcgaccgccatggcggttcatggttcttcatcggcgagatctacatcgacatcccgttgccgatcgacacgccggccacggcgcactgcggcacctgcacgcgttgcatcgatgtctgcccgacccaggccatcaccggtccgcagcggctggacgcgcggcgctgcatttcctacctgaccatcgagcacgacggcaccattcccgaagacatgcgtccgttgatcggcaaccgcatctacggctgcgacgactgccagctggtctgcccctggaacaagttcgccaagcgcaccgacgaagccgatttccgcgcgcgcaacaacctcgataccgcgcgcctggaccagctgttcgcctgggacgaggccgagttcctgcgccgcaccgagggcagcccgatccgccgcagcgggcacgagcgctggctgcgcaacatcgccgtggcactgggcaacgcaccgtcctcggccgaagcattggccgcgttgcagacccgcgtcgatgatccctcgccgctggtgcgtgaacacgtgcagtgggcgctgggccagcacacggcgcgctgacgtgcgatcctgagcccccgctccacccgcagcacgccgttcccatgcagccacgcaacaacgacattttcacccccagccagctcaacaccctggcccgcgacctgctggaaggcagtttcccggcgatctgggtcgaggccgaactgggcagcgtggcgcgtcctgcctccggtcacctgtatttcaccctgaaggacgcgcgtgcgcagctgcgtgccgcaatgttccggatgaaggcgcagtacctgaagttcgtgccgcgcgaaggcatgcgcgtgctggtgcgcggcaaggtgaccctgtacgacgcccgtggcgagtaccagatggtgctggaccacatggaggaggcgggcgaaggcgcactgcgccgcgccttcgaggaactgaaggcgcggctggaggccgagggcctgttcgacccggcccgcaaacggccactgccggcgcatgtacaacgtctggcagtgatcacctcgccgaccggcgccgccgtgcgcgatgtgctgagcgtgctcggccgccgtttcccgctgctggaagtcgacctgctgccgaccctggtgcagggcagcagcgccgccgcgcagatcacccgcctgctgcaggcggccgatgccagcggtcgctacgacgtgatcctgctgacccgcggcggcggttcgctggaagacctgtgggccttcaatgacgaagccctggcccgtgcgatcgccgccagccacaccccagtggtttcggcggtcggccacgaaaccgacttcagcctcagcgacttcgccgccgacctgcgtgcgccgacgccttcggtggcagctgaactgctggtacccgaccagcgcgaactggccctgcgcctgcgccgcacggccgcgcgcatggtgcagctgcaacggcatgcgatgcagcaggcgatgcagcgcgccgaccgcgccctgctgcgcctgaacgcccagagcccgcaggcgcggctggacttgttgcgccgacgccagctggatctgggccggcgcctgcatgcggcgttcaaccagcagcaggagcgccgcgccgcgcgcctgcgtcatgcggcggcagtgctgcgcgggcaccatccgcagcgccagctcgatgcgatgcagcgccgcctggctgccctgcgcgggcggccgcaggccgcgatgcagcgcctgctggagcgcgatgcactgcgactgcgcggactggcgcgttcacttgaagcggtcagcccgctggcgaccgtggcgcgtggctacagcatcctcacccgcagcgacgatggcaccctggtacgccagatcgatcaggtaaagccaggtgacgcactgcaggcccgcgtcggcgacggtgtgatcgacgtacaggtcaagtaaggggtgttcggcagggctgcgccctgcacctgcggtagtgccggccgctggccggcaacctcaacagcaacagcaaaagcggctctggattgctgatggtttggcggggcggtgtggctgtgcaggacacgccgtaaaccccgctgcacggtccggcccagccgccggcggctgtgcgttcgggcgcttgcgaagcagtgcttcgcaagcaaagcgccctcacccttgggggctcgatggcgccaacggtcctgcacagccacaccgccccacctctgacagattccgatgactgttggtaggtgtcgagcttggtcgacacggtagatccacgccatgcgtgaatgcatctctgccagatggcgaatcaattcggggtcagatccgatttcctacggaaaacggatctgaccccaagagcatttccgacagaccgcagcaaactgtcgaaggcggggtgggtccggttgcgggagtgtccgcggcatggatgccgcggccaagcccccatggaagggtttacggcgtctcttgcaaccggacccaccccgccatccctcaggaaacccgcttccgctgttgctgctgccggccagcggccggcactacctaccgcgggtgcagggctgcaagccctgccgcccctccccctactttgcctgctcgcagaacttctgccggtactcgagcgccttcggcatcagcgcctgcaggttctggatgcgggtacccgggttcgggtgggtggaggcgaactccggcggcgcctggccgccactggcctggcccatgcgctgccacagcggcaccgcctcgcggggatcgaagcaggccgctgcggccagcatcagccccacttcatcggcctgcgtctcgtggctgcgcgcatagggcagcaggtagccgtagcccatcgccgacatcatcatctgttgctgctgcgcatccatgccgctggcggcaccagccatctgcccgatctgggtcagcttctgctgcgccatccgctgtgcaccatggcgtagaagcgcatgggcgatctcatggcccatcaccaccgccatcgcgtcacgcgtacgcgccaccggcaccaggccggtgtagaccgccatcttgccacccggcaggcagaacgcattggcctgctcggacgggatcacattcacttcccactggaaatcccgcgcgaaatgcgccggctgcacgccgtgctcctgtgccagcgcggtctccaccacgtccaccttggcgatcaggcgctgggcgatgtcgcgcacatcacgcgcgatcggcgcattcggatccatcggccgttcctgcgacaggatctgctggtaggcctgcagcccgagcgcggtctcctggcgcgcatccaggctgctgtcgatcatcaccttctcgccggtgtagggatcgaccgtgcgattggagaaccagtagaacaccgcatagcccgctgccagcagcagcacccaccagcggatgttgccgaacaggccgcgccgctgcgggccttgcggcgagcgggaaaagggatcgttgcgcatcggtgtcttccagcaggccccgccggccggcgggcacggcgcaatcttagtgcgcggacgccagcagcgggtgaagcccgatgctcagatgccccgcaccagacggaagccgatgcgcgcgttggtggtgtccgagtcctgcgattgccgccaggccgcacgggtctgctcgggcgcattggcccagttgccaccccggatcacccgcgaccggcagcccgggttgaaccaggcgacaccatcggacggcgcacgccggtagctggcatgccagcagtcggccacccactcgctgagattgccagccatgtcgtgcaggccgaaggcattggcctggaaactggccaccggcgcgggcccccaccagccatcgccatagccgacgaaggcgttgtgccagtgccgccccgagggcgagacatccttgctgccggtgaagttgccagcgccgggcggcggcgtgccggcgtcgccccacggataacggccactgctgccggcacgcagcgcgtactcgaattcggcctcgctcggcagccggtagctgcgtcctgtctgctcggacagccacgccgcgtagttttcggcatcacgcacgctcacatgcatcaccggcgaattgcccagtgcgcgcgcgccatcgtaatcggaacgccagtccacaccgctgcggcggatgaaattgccgctgcgctcgtcatagaccaccgagtggccgcgccgggtcgcacgcggccgcgcattggtcgacttcacatagcgctcgaaatcactgaccgtgatctcggtgatcgccatcgcaaacccgcggtcgaagcgcacataatgcgagggccgctcggcatcgctggcaccgggctcggcatcacccgcgcccatctggaagccaccatgcggcaccacgatcatctgcgggccgcgcccgccatcgcgcatggcgtcgctgaacacctgcccgggacggaagctgccgtaatgggtggccaggtcgatgcgttcgcgcaactgggccaccaccgcatcccctggcaaggcgatgcgcagggcctcggccagcttctcgcgcgccggcttcaggccctgtggcgtcgccagttcgcgaaggccatcatcgcgcagctgcagcagtgccgccgcgcggatctgttcgatacgttcgaaggcatcggcaatggccggtgatgagtcacggaccttgctggcttcggccagccaggtgccggcgctggcaaagtcacgcacccgcgccgcgtcctcggcacggcggatcaggccactctcggccgccgccaggccctgccgtgcccggctgttgtgttcatccagggccagcgcttcacggaagttgccgatcgctccgtcaccgtcctcaccgatccgccccgaacgcaggtcttcctcgccggcacggttgtaggccaccacgcgctgggcgagctccacccgtccctgcagcgcgcgcaccttctcatccttcggcgccagggtcagcagcaccagtgcctggcggctggcctcggccagcgcctcgcgctgctgcagcggccggaccagcagggcatcggcctgctgctgaaggcgctggcgggcgcgctgcaggccgttgcgggcctggcggtcatccgggtcttcttcctgcaccgccagccacagcggaaccgccgcgtcggcgtcctcgtacaggcgcccttcggcgaacgccttctcggccgcgcgacgaagctgggccaggctgcgcccctgccggtcgacccgcggtggcgtccaccgctgcacatcctcggcggcatcctcaccggcgatggtgacgctgccctgcgccgcctccggcgtcgcgtccgcctgcatgccttgctgcggccgtgcgtcttcgccagcagccggtcccggctccggcgtcgccgagggcgacggcgtgcagccggccagggccagggcggtgcacagcacggacgacagcggaaaacgcaagcaggatctccttcggcacggatgcggaccgacgttaggctattctcccctgcctgagcaaacccgagtagtaggccctgacccgtggcaatctggatcaccacccccgccgagctggatccgtacttccagcagcgtccggcccgcatcggcctggacaccgaattcatccgtgaacgcaccttctggccgcagttggccctggtgcagatggcggtcgggcaggacatcctgctgatcgaccccctgattcccggcatgaccgaggcgctggcgccgtggctggccgatgaatcgatcgtcaaggtgatgcacagcgccagcgaagacctggtcgccttcaagtgggcctgcggcgtgttgccacgtccgctgttcgacacccagatcggcgcctcgctggccggcatcggtggcggtatgggctaccagaagctggtcgcggaaatcaccggcgtggcgctggccaagggcgaaacccgctcggactggatgcgccgcccgttgtccgagtcgcagctgcagtacgccgccgacgatgtcgagcacctgttcgcgctgcatgacgccatcgatgccaggttgcaggcgctgggccgccagcagtggctgcacgacgacggcgagcgcctgctggccagcgtcgccaatgacgaagaccgttggccgcacctggcgatgcgctcggcgcagttcctcgacacggccgcacagcatcggctgctgcgtctgctgcgctggcgcgatgtgcaggcacgcagcagcgaccgcccgcgcagctggatcctggacaacgaactggccgccacgctggcacgcacgccaccggccgatgccgccgcactgggcaagctgttcgaacagttcccgaaggcaccgcgcaagctcgcgggcgctgtgtggcaggcgctggatacgccgctggccgatgaggccgaagcaccgctggcgctgccggccaacgacagcaacaagcaggcactgaagaagctgcaggacgcggttgccgagcgcagccgcgaactgggcctgccggatggcgtattggcctcacgcaagcacctggaaagctatctggaacgccgccagtggccggccgcactggccggctggcgccagcaagagctggaagcgcggctgcaggcgctgctgccggcacgctgaagcaccgggcgcggcgccggattgcattcccgccgccgtcgaacgcaacaagaagggcgacccggatcaccgggccgccctgcgcactccagcagtgcgagggtgggaccgcccaccctcgcggcaatgccttaccagttcatgttcaacgagacaccgacggtgcgcggttcgttgtagaccgcggccatgtagttctcgatcacacccttgaggttcttctcgttggtgatgttgcgcgcgaacagcgccacttcataggcaccgtagttgcccgagtagccgatcttcaggccgccctcgaaatcacccttggagttgaactccttgctgtcgtacagcacgaagctggtgtagccctgcttgttccagtcggtggacacgaacatggtgcccgcgtcgctgaccgggaagtcgtagcgggcggccaggttgacgttgtacttcggcgcgttcggcagcgggttgccgtcgatctgcgcgaaggtattggcaccgaccttgatggtcgggtcattcaccgtgcacaccaccttgccgttgaggccgcagacctgcgcgtagacgcgcttgtccttgatctcgctgtgcagcaggctgacgccggcgctcagggtcaggttcgggatcgggcgcagctccatgtccgcttcgaaaccgtaggccttggccttgtcggcattgaacagcacgccgttgccgtccgaatcgttgccgttgagctggatgtcattgacggtgtaggtgaacgcggtggcgttcaggcgcaggcgattgtcccacaggctgctcttcacgccggcttcccaggacaggatggtctcggaatcagcggtggtgaagtcggcattgaacaccgccgaacggccctggatggtcgggccgcggaagccgcgtgcgaccttcgcatagacgctcacgtccggcgtgatctggtacatcgcgctcagatcccagctcggggtggtgtcggacatcttgacgtcggtgcggcccttgtaggtcaccacgccggcggcggtgtcagcggtcttcagcaggcgggtgtgcttctcgtccttggtctggcgcaggccggccgtgacggtgaacttgtcggtgaaggcgtagctcagctggccgaaaccggcccacgaggtgttcttgttgcgcagtcgcacccagttgttcgggttgcgggccgcaccctgcaggaaccacgcacgctggtagaagtcggtggtgtcgctgccgttgaagtagaacgcaccggcctgccactgcagggcgctgtcgtcatggctggccaggcggaattcctgggtccactggtccaggtcgcggatgcggcccatcgactggccgtagccgttcggcacaccgttcaccgggaagttcaccgccgcgccgccgtcggtgtcaccacggctgtagccggaggtggtctcataggcggtgatcgaggtgaagtcgatcgcgccgaagtcgtagcgtgccttcaccgagccgccgtaggtcttgtaggcctgcgggttgttgtcggcttcgtcgtaggcgacctggtcgcgcggcacgtcggtcttgttcgagcccttggtcagcgcaccacgcaggaacagggtcgaggtgccttcgtaatcacgggcgtgggccgaggccaggatcgagaactggtcgctcggggtcagcagcagctgcgcgcgcacgttgcggtcatcgaagccgcccatggcgttcttcttcgggctgaccgtgccgtcagcgctcgggcccttgtaggtgttgtcgacgtagtcgtcgcggtgctggtacagcgccgacacgcggaacgaggcgatgtcgttgatcgagccgccaaagccgccgtcgatcgacacgctgttgtaggtcgcatagctggcgctgacgcggccggtgtagtcctgggtcggcttcagcgtgtcgaacttgatgatgccggcggtggtgttgcggccgaacagcgagccctgcgggccgcgcagcacttccacctggtccacgtcatagaccgggttggacttcagcaccacgtgctccagcaccacgtcgtcctggatgatcgacaccggctgcgaggcacccaggtagaagtcgatgttgcccaggccgcggatatagaagcgcgggaagatgcggccggtggtggtttccgcatacaggctcggcacgcggccggacagcgccagcagggtgtcgtcgccgccggcggtgaagtcgcgcatgcgctcgccctgcaccacgcccaccgagaccggcacttcctgcaggttctgctcgcggtgctcggcggtcacggtgatcgtgtccaggcccgtcggggtcggcgcgctgtcctgcgcggcggcaccaaagctgccgaccagggccaggccggcacaggccagggccagcggatggcggcggaaggaaacgaaggaagacgacatacccgacaggcggcgggaatcggaatgggagggcatggaatgctctgaggaggcgtccgtgcggcctgcgcgagccgggcggcaaaaaggaggagaactgcgcaagccgccattatcccccaaattgttacgatttcgttgcgcggcatccgggccagacaaaccggacggtttcggcacagtgcacgccttcatgccacgccgtccggcacatcccgggtcggcttggcaaggcgcagccagttggctacactgaagccctgccgtggggccatagctcagctgggagagcgcgtcgttcgcaatgacgaggtcaggagttcgatcctccttggctccaccactcattaagaagacccgccgatcgtcgcgatctgcgggttttttcttgcatcgatcacgagtcaggcaggttcctgatccccgtccttgcggcgtggaccacgcgaatgcgtatcacgcacctgctgatcgcgctgccccggccgctgctttgccacgtcctcctgcgccctgtcctgacggctttcctgtacgccctgtttcggatcgccagggtctttgtcgcgctcgctcatcgaagtctcctgtgccggcgaaggccgatcaggacttcacgctagaggctgcgcagtgatccgcaggtcaggcccgcgcgaacagcgtgtgcagttccgcttgccgccgcagctcacggctctgcagaatccggaccaacatgcccagccagtccgcgatgtcacctcccgcccagcacgccgcgcgtacgctgccaatgcgcctcgatccagcggacggcagcatccagctcggccacctgacgacgttgatctgccccaccctgtcactggaggaggcgcgcatcgccttcgccacgctgatgcatggcgagcgcgatgccggcaccggctatcactggctcagcctgcaccgggtcagtctgggcggtgcgcccgccggcatcagcctgtgcttccacgggcaacagctcgacatggtgacgatcggcgtcgatctgccgggtgcgacactggaagacggctggccgacccaggtcgcgatcgatgccgaagtcgctttcatgcgtcgcaccttggccacggctctggggcgcaaactggcaggtggccgcgcccggttcgactggggcgaggcatgggcccggttcgacccgaaaggcttcatggccagcagcggtatccgctacacgccgcgctcatgacgccgctcaggtacgggtgatcgacactccaccttcaacacgcatcgcggtaccggtaacgaaactgctttcatcgctggccaggaacagcgccgcgttggcgatctcctccggctcggccatgcgcttgagtgcgtgcagcgagcgcacgaagtcgcgggcatcgccggtgggtgcggcctgccggcccatctcggtatcggtaccgccaggcagcagcacgttgctgcgtacgccacgcgcgccgtactcggcggcgatcacctggctcaggccgatcagtccggccttgctcgacgcgtaggcggccatacccgggaagcccacggtatggccgacaaaggtaccgacaaacaccagcgagccacccccgcgtgccagcaatgccggcaactgcgcgcgtgcggcatggaaggcggcgtcgagattggtggccatcacctcgcgccacgcatccgccgggaactctgctgccggcacgccggggccgagcatgccggcattgttgagcgcgatgtccaggcctccgaatgactgttgggccagatccaccagcgcctgcgccgtgcccggatcagccacatcggcggcatgcatcaccacctcgccgccggcgccacggatctgctcggccagtgcgtgcagcggttgcggccgccgcgcattgagcaccagttttgccccttcggcagcaaagcgcagggcgctggcacgaccaatgccagcgctggcaccggtgatgagggcgatcttgttgttcaggcgcatgagggtggtaccggttgtggagtggccgccacgatgccgcgcctccggcccaccaacactccgtttccgggcctcgcggccaggtgcaggaaacggagtttccgcagaaccggcacgtgccagaatccgcccatggacagcaccgccaccaccgccctcgacgcccgcgtcgaacgggtctgccgccatctgcaggccagcctcgacgagccctcgctgcaggagctggccgacatcgccggctgcagcccgacgcgcctgcatcgcctgttcaagcaggccaccgggctgacccccaagcagtacgctgccgcgctgcgcgccgaccgcctgcgcaccgggctcgaacagcaggagcgcatcaccgatgccttccacgatgccggcttcggctccagcgggcgcttctacgagaacgcaccgaagttgctgggcatgactcccaagcaatggcgcgcaggtggtctcggcgaagtcatccacttcgcgctggccgaaagctcactgggcagcgtgctggtggccagcagcgggaccggcgtggtcgcgatcctgctcggcgacgatccggaggcgctgctgcagtcactgcagcaacgcttccgccaggccgaactggtcggtgccgaccacggctatgagcaactggtggcacaggtggtgggcctggtcgaggatccctcgcgaggcgccacactgccgctggatatccgcggcaccgccttccagcagcgggtatggcaggcactgcagcagattccgcgcggccagaccgcgtcgtatgcggatattgccgcgcatatcggtgcaccacgctcgagtcgtgcggtggcacgtgcctgcgcgagcaatccattggcggtagccgtgccctgccaccgcgtggtgcgccgcgacggtgacctgtccggctatgcctggggcgttgcgcgcaagcgcgaactgctgcgccgggaaaaggtcgccaacggctgacgccacccgatagccgccgaccttggtcggcacacccagcttccggtagtggccgaccttggtcggcacacccaccaagcactcaatccagcttcaccaccagcttgccgaagttgcgcccctgcaacagcccgaagaacgcctccggcgccttctccagaccttccaccacatcctcgcggtactggatgcggccctcgcgcagccactgcggcatctcgcgttcgaagtccggccacaggtggttgaagtcgtgcacgatgaaaccacgcacggtcaggcgctggcgcaggatctggctgaacagtgacggcagccgatccgggccaggctgctcgacgccccgctcgttgtaggtagcgatggtgccgcagaccggaatgcgggcgaagtcgttgagcagcggcagcaccgcatccagcacatggccgccgacattctcgaagtacacgtcgatgcccgcaggcactgccgcgcgcagctggtccgcaaaatcagccacgcgatgatccagcgccacgtccacgcccaacgtctgcagataggcacgcttggcctcgccaccggcgatggcgaccacgcgcgcgccctgcagcttggccagctgcgccacggtcgcgcccaccggcccggtcgcggcggctaccaccaacgtctcgcccggcttcagacgggcgatttcatgcaggctggaataggcggtgaaaccgggcatgccatatacccccagcgccgtactgagcggcagcccggccggatccagacgacgccccagcgccttggccggcagcaccgcgtgggtctgccagccacccggcgccagcaccagctcgcctgcggttacgccctcggccttggattgcagcacctcggccacggtctggccttccatcaccgcccctaccgccaccggcgcggcatacgacgggccctcgtccatgcgtcctcgcatgtacgggtccaacgaaaggtagcggttgcgcagcagcacttcgccatcggccagtgccggcagcgcaacctgttccaggcggaaattggctgcacttggcgccccctgcggacgcgaggcaagcacgatgcgggacgcggtggaggaatcggacatggccaggtctctgctgttgccagcatcgggaaaggactgccgacactacgctgcggcgatccccgatggcggccacgaaaacagcgttccattgcccggacccgcgcgggtccggcgcaccccttgcccttgcagctttggcgaacgcggcgacctgctgatttccaccgcagacgacaatcgatggggcacgccccgccccacaacggaggatcaagcacttgcgagcgcgcagagggcaatgtgaagaaatcttggcaaaacgcttgccgaaggcagccgacctccgtaatatacgcgtccttggcagcgacctcgctgcaacgaaacatgtggccgagtagctcagttggtagagcaggggattgaaaatccccgtgtcggcggttcgattccgtcttcggccaccactttcgaaggcctgcagaaatgcgggtcttttttttccggaaaccgctctcaccgcggtagccacacaatttggccgagtagctcagttggtagagcaggggattgaaaatccccgtgtcggcggttcgattccgtcttcggccaccatcttcagagacctgcagaaatgcaggtctttttttatttgcgcttcgcgcaagcggcgaccaccgtggcccggttgacgaaacatttacaccggcacgggccgcggcacctacgctccagactcctgcctggagcctgccgatgcatctgcgccccaccctgctcgcctgcctgctgctgaccgccttcccggtgatcgccactgaaccggtgcgcgcggtcgagcacctggacattgatcgctacgcgggccaatggcacgagatcgcgcatcttccagtctcgttccagaagcagtgcgtgggcgacatcaccgccaactatggcctgcgccgcgacggccgcatcagcgtcaccaatgcctgccgcaagggtgacggcgagcgcgtggtcgccgaaggcgtggcacgcccggtggccggccatcccgggcaactgcaggtgcgcttcgtccccgactggctgagctgggcgcccctggtctgggccgactactgggtgctggcgctggacccggactatcaatgggccctggtcggcgaacccggccgcaagtatctgtggatcctctcgcgcctgccggagatggagcgcgatcggttcgaacagttgaaagccaaggccgagtcgatggggtacgacctcgggccactgcgcctgatggccccgctgcgcgatcccgcggccgactgaaccgcttcgcatccggcgcatcgtgcgcgcgccatccggcgttgtgcatgcccgaccgccatcttcacgcgctaccctctgcggacgggtcgccccgggcgatccataaaaccatacgccgtagtatgcttaccccaacgcaccccctccagaggacttgcgcccatgctccaccgcttccgtaccgccttgatcgtcctgtgcaccctcgcccttgttgcctgcagcaacggcatcgtcaagcgtgtttcggaaccggcggccagcctgcagcagctgaccgtgcgtgccgacggcaactggaccgtggccctgcgcctacagaacttcagctcgatgccgatgaccttcgatgatgtctcactggcgctgaccgtcggcgacagcgatgccggcaccctgcaggtcaagcccggcatctccatcggcggcacctccgccgacgtcatcaatgtcgacctcgtgcccagctcgaccgcgcgcctggtggtggccgacgcgctggccagcaaccgcaccctggcctacgccctgaagggaacggtggcggccacgccgcaggaaaagaagcagcgcagcttcgacatcagcagccgcagcaccctcaaccaggcccccggcctgcccggcgtgctgcgctgaacccgcctttcgtcgcggcgcccggcgccgctcccctctgccctgatcaaatcgagacgtaccgatgagcagctacaccgccccgctttccgacctccgtttcgccctgcacgacgtgctcaaggtcgaacccctgttcgcccgcctgggcttcaccgacgccaccgccgacgtggtcgatgccgtgctggaggaagccggccgcttcagcgccaccgtgctggccccgctcaacagcgtcggcgacgagatcggctgcgtactcgaccaggccaccggtgaagtgaccaccccgcccggcttcaagcaggcctacgaccagttcgtcgatggcggctggaccggcctgaccgcctcgccggagctgggcggccagggcctgccgcacaccctgggggtgccgctcaacgaaatgatcaacgccgccaacctggcgtggggcaacttcccgctgctctcgcacggcgccatcgaagcgctgaagcagcacggcgaggcgtggcagcacgacgccttcctcaagccgctgatcgaaggccgctggaccggcacgatgtgcctgaccgagccgcactgcggcaccgacctgggcctgctcaagaccaaggccgagccgaacgccgacggcagctactcgatcaccggcaccaagatcttcatcaccgccggagagcacgacctgaccgggaacatcgtgcacctggtgctggccaagctgcccgacgcccctccgggcgccaagggcatctcgctgttcgtcaccccgaagttcaaggtcgaccgcgatggcaacgtcggcgagcgcaatgcactgcgctgtggctcgatcgaacacaagatgggcatcaaggggtcggtcacctgcgtgatgaacttcgatggtgcgcagggttacctggtcggccagccgcacaagggcctgcaggcgatgttcaccatgatgaacaccgcgcgcctgggtgtcggcctgcagggcatcggcctgtccgagcgcgcctaccagaacgcactgaagtacagccgtgagcgcctgcagtcgcgcgccctgagcggcgccaggttcccggacaagccggccgacccgatcctggtccacccggatgtgcgtcgcatgctgctgaccgtgaagtcgctggtcgaaggcagccgcctgctggcgctgcatgccgccaccctgatcgacatcgcccaccacgcccaggatgccgccgagcgcgagcgcgccgacaccctggtgagcttcctgaccccgatctccaaggcctgccagaccgaatggggcatcgagaacacctacaacgccctgcagtgcttcggtggccacggctacatccgcgagcacggcatggagcagctggcccgcgatgcacgcatcaccacgctgtatgaaggcactaccggcatccaggcgctggacctgatcggccgcaagaccgcatccagccagggcgccggcctgaagctgatgctggccgagatcgaagccttcgccaaggaacacgagggcaacgaagcgctggccgagttcatcggcccgctgcgcgccaaggccgccgaatggggcaagctgacgatggacgtgctgcagcgcgcggccgccaatcccgacgaactgggcgcggccagctacgactacctgttctattcgggttacgtggtgctggcctactggtgggcccgcagcgtggccgccgccgatgccagcgcgcacggcgccgccttcgcccagggcaagcgcgagaccgcacggttctacttcgcccgcgtgctgccgcgcaccctcagccacgccgccgcgatccaggccggcgccgcgccgctgatggccatggacgacgagcgcttcggcgcctgagccgggcttcgcccggcacccgcggtagtgccggccgctggccggcaaccgcaatagcaacagctggatccgggtggatggcggggcggtgtgggctggcaggacacgccgtaaaccccgctccgcggtccggcccagccgctggcgactgtgcgttcgggcgcttgcgaagcagtgcttcgcaagcaaagcgccctcacccctgggggctcgatggcgccctccatggcgccaacggtcctgccaacccacaccgccccgcctctgacagttccccgcgatctgcgtagatccacgccacgcgtggatggaaaccaccgaaatccatctggggaaaagcccccctttgttaagggggcgcaccgaaaggtgcgggggataggaggaatgcgcggacctgaatcattgcgatttgggtttcgccctccgggcgatacccaaatcgcaatgattcaggtataagctgttctcccgatggagacagacactacacgcttgggtctgatcgaagccggagctccgttttctgctccgggcgccgaagcatcgcccaacgccacgacgctgcatcgccccggttcggtccggctgctctcgcttgatgcccacggacgcgtactggactggatcacctggcaggatgcggcctgcctctacgcccgcgaggcggtggcctggacgctcggcgacccctgcctgcacatccacggcggcaccaaccgcttcagcggcctgcagagcggcatggacctgcacccgatcatcgccgcccgcggccacgcccgctcccgtgcgatcgacccgacgccgaacctgaccaaccaggcccttttcgcccgcgacgcccatctgtgcatgtactgcggccagcagttcagccgccccacgctcacccgcgatcacgtcatgccgctgtccaagggcggcctggactgctgggaaaacgtggtcaccgcctgcttccactgcaattcgcgcaagagcgaccgcaccccgcagcaggccggcatgcccctgctggcagtgccctaccggcccagctggatcgagcacctgatcctgtccaaccgcaacatcctggccgaccagatggccttcctgaaggcgcaattgcccaagcgctcgaaactgagcacctgaacgcctgaaaatgcaaccctcaccgtcctgtcacggacggcggcgtttgcttgccccacccccgtttgagggcgaaaatgggcgttcagaaaaagtgcgaacatgatgatcgactctgcccgctatccccgcctcgcgcgcatccagacgccggatgacctgcgcacgttcgacgaatccgaattgagggcggttgccgacgaactgcgcgcctacctcattgaatcggtgggcaagagtggcggccacttcgccgccggcctgggcgtgatcgagctcaccgtggccctgcactacctgtaccagacaccgcacgaccagctggtctgggacgtcggccatcagacttacccgcacaagatcctgaccggccgccgcgacgagatccacaccgtcaagcagaaggacggcatcgcgccgttcccgaagcgcgaggaaagcgagtacgacacttttggtgtcggccactcctcgacctcgatctcggccgcactgggcatggccatcgcccgccagtccgaaggcgacgaccgcaagatcgtggcggtgatcggtgacggcgcgatgaccgccggcatggcgttcgaagcgctgatgcacgctggcggcatggagccggagccaaacctgctggtgatcctcaacgacaacaacatgtcgatctccgaggccgtgggcggcctgaccaagatgctgggccgcgccaccggcagccgcacgctcaacgcgctgcgcgaaggcggcaagaagattctcggtgacaagaagaacaatccggcacgcttcgtgaaacgctgggaagaacactggaagggcatgttcgtgccttccacgatgtttgaggaaatgggcttccactacaccggcccgatcgacggccacgacatgcccgccctgctgtccacgctgaagacgctgcgcgcctccaagggcccgaagctgctgcatgtgatgaccaccaagggcaagggttacgagccggccgagggcgaccagatcggttaccacgccgtgggcccgttcgatccggacaagggcctggtggccaaggccggggccaagaagccgacgtacaccgatgtattcagcgactggctgtgcgatgccgccgccgccgagccgcgcctgtacggcatcaccccggcgatgcgcgaaggctccggcctggtgcgtttcagcaaggaatacccgcagcgctatttcgacgtggcgattgccgaacagcatgcggtcaccctcgccgccggcatggccacacagggtggcaagccggtggtggcgatctactcgaccttcctgcagcgcgcgtacgaccagctggtacatgacgtggccatccaggacctggacgtgctgttcgcgattgaccgcgccggcgtggtcggcccggacggtgcgacccatgccggcaacctcgacctgagcttcctgcgctgcgtgccgaacctggtggtgatggcaccgtccaacgaagccgagtgccggcagatgctcagcaccggcctgcagcacccgggcccggccgccgtgcgctacccgcgcggcaccggcactggcgttgcagccggcaccgacctgtcgaccctgccgatcggcaagggcgaactgcgcctgcagggcagccgcattgccctgctcgccttcggcagcaccgtggccgccgccgagcaggtcggtcgcgaactgggcctgagcgtggtcaacatgcgtttcatcaagccgctggaccgcgagctggtgctggctgtcgccgcccagcatgagggcctggtgacgatcgaagacaacgtggtggccggtggcgccggctccggtgttggtgaactgctcaatgccgaaggcgtgctgcgtccgatcctgcacctggggctgcccgacagctaccagcaccatgccagccgcgaagacctgctggccgaagccggcatcgacgccgccggcatccgcgctgctgtgctcaagcgctggccgcagctcgccgcaggtaccccgccgctcagcgcggcaggctgaggccgatcaccacccggtagatccacacagggcgcaatgggcgcggacagcgtccgcaccctccaggctcgcaacgcgtagatccacgccatgcgtggatgatggaattccgggtgcctgccttggcaggcacccgcgctcagccgtaactgaccgcttcgacgaatgcgccgctggcttccacgcgcacggccgcacgctgaccggtgtcgacaaagtgcaggcgggccagggtctcggcgaagtcgtaggcgcgggcgccatcgcggaactcgatcggctccggccggtccggatgcagcacgcgccactggcgctgttcgcattgcaggcggatcaacatgcagctcactccttgaggcagcgtatcgatggcggcgggatgcccatgccggttatggcacacggcaccgctggaattcagggcacgcaacgtgccctgatcgcagacaatacggcgttcaaaatgtgagctgtatcagattattctgattttcatgggctgaacccgtaaagctcagttcacctggaactgcgcccggcagccatcactcacccagatgccgcggcgatcccagccccagctctggccttcgatgcaggcgctgcgtgagtcctggcggatcaggcgcacaccccggcggatgcgcgcatcgcagtactcctgccgatgtccattggaatggcaggtgaccacatcgccgccgccccatccgttgccattgccattgccccagccgccaccattgccaccccagccgccaccgcggcggtattcaccgacgaattcggcacggcacccctgtgtgacccagacgccgttgcgcgactggccccaggtctcaccctccacacagggcgaaccggacaactggcggatcaaccgcgcgcggccgtccaggcggcactcattgctgcggttcttgaccgactcgcagcgcacgatgccgctgccatcgcggccaccatagcggtcgtcgtcatagccgtagccatagctctgcgcctgggcgccgccggccgccgccagcatcggcaacagggtgcaggccagggtgcgccaagtgagtgcgttgcccatcgaaatctccagatgaatacgatggcgcaagcatccgggattcacggcccggcgcacagaggggagcgcaacggcagtttttccccattcaaacaacgcaaccggacctgactggaccgccgtgagctcatggccccccgtttgctgccccactggccatgccaccggcattgcccaggcgttcctcgaacgcataggcgaacagctcggcatcattgctgatgcccagtttcctcatcgccgaaatgcgttgccggctgatggtactgacggtgcgccgcagctgcccggcgatctctgtgatcgaaggccccgacacatacagccgcagaacttccagctccttgggcgacagtactgaaagcgatcgctcacgcccggagtcctgcaggcagggcgccagctcggggtccaggtagatcccgccactcagcacggcatcgaccgccttgcgaacgccatccacgccactgcttttgcacaccagtccccgcacacccgtgcgcatggccatgttcaaggtcgtggcattggtgaccatcgtgaccaggatcaccggcaccttggggtaattgcgactcaacgcctgcagcatcgactggccatccgagcgccccccagtgggcatcgagaaatcagtcaccaccagatcaacgacttcttcggccaggatcgacataaggctttctgcacaccgcgcctctgccaccacgcgatggcgcccaccagcctcgatcacgatgcgcgtaccaagcaggatcagaggatggtcgtccgcgatggcaattcgagtgagcatgctgattacccgtaaatagtcacgccgcaatgcgcagcgaaaaccctagtaatcattccgggcaacgtcaacttaacaatgatccactgcaattgatttcattcaagcagaatcgccagcccgtttccattatttgcactcgcgatcataaacaaacgccgcgcgtgaaatttcccaatagtttcattccagaaatccggaaaggccgcttacatatccatctccgattactcgctgcgctggacaccccatggtccgattccgtcgtcaatcgtttgaggatctgcaaggaccacttgaaccaacgccgctggcaccggcaacactgccgacggcagcattgccgttcgtacagcagttgcgcctgcacctggcaagcgacagcacgccgtcacggcggccggcccatgccgcgatcatccacggcgaggccacggtgtgctggctggatgccaggaacgaccggatgatgaccactgcgccagcgccgatcaccctgacgctgctgcagaggctgttgcgcgatgaggatcccccgctgagtctggtgccggtgacccaggatgtgttcatgcagcgcgcgacagtgtccagcaacatcccgctacgcccgaccctgtggaacgtcggcctgtccacggctgatcacaacgcgccgatgcctaccctgcacgagagcgcgaagctgcgccttcgtcgctggccggatttccgcatcctggcccatcggccggatcatttccggctgtgcgcgctgctgatcaagcaaggcgcatccgtgcaggcgtgctgcgacctcctcgacctgccgcgccgtaccgtgcagtcgttcttcaatgcggcgtttctcaccgcctatgcctttcccgtcgtaggcgaggacgcacccgtgcgcccctcgcccaccgatggcctcgtcaacctgtggcgacaacttcgcatccgctggagtgcatgaccgtgcgtgagcacaagatcgtagtgatgggcccacttggcgcgggcaagtccaccctcgtgcagaccctgacccggggcaaggccgtagtgaccgaggcccgcaataccgaccctgccgtgggcaagcagtacaccaccgtagccatggactatggcgacatcgacctgccgggtggcgaccgcctgcgcctgtatggatcgcccggacaggagcgcttctcgtacatctggccgatcctgctggccggtgccgaaggcgccatcgtcctgatcgatggcagcgccagcaaggacagtacgctggcggggcagcacctgaaggccatcgcagacaacgcgccgggcctgcccgtggtcatcggtttcacccggtgcggcagcaccgatgacccggtacagccgcactggcaggactggttgcaggaccacgcaccgcacctgccggcgttgccgctggacccacgcgacatggcgcaggccatcaccacgatggatctgctgatgagtcagatcgaatgcaatgccatggcggtcacccatgaatgacatcggccacgcttcggcactggatgccctggcacgcgacgtcaccggcatccaggccctcgtcgttgccagcaccgatggttttgcactggcccaggccggcccgcaaggccatgtcgccgatcgtctggccgcgatgaccagttcgatgctcggcctggccagcgcgctgggccgcgaactgcactttggcgaactcgacacactcatcctcgatgccgccaacggcaaggtactcatgctcgccattccaggaaagcaaccgcgcctgctgatgaccgcatgcgaccacagctgcgtcatcggcaacgtgctgtggcatgccaagcagtgcgtgcgtgccctggccgacaacccgaactgatgcatgcccctctcactgatcagacggctcttcaactcctcacacccgcaacggaccactgaaatgaatatcgccatcaacaaatgcctggacacgctcatgcagatcaacggcgcacaagccgttgccctggtcgattacgaaagcggcatgctgctgggtgaagccggctcaggcgtggacatggaactggcggccgctggaaacaccgaggtgctgcgcgccaagatgaaaacggccgaagcgctcaaactcaacgacaacatcgaagacatgctgatcaccctgggtcgtgcgtaccacgtgctgcgcccggtgtcggccaagaagggcctgttcttctatgtggtgctggatcggcagaaggccaatcttgctctcgcccggcgcatggtgctggacgtggaaagctcgctggcgctgtagcgcacgacaacgatagccaggggatgcgaatgccggggccgctctggggagagcggccccgggcagcagttgcaccgcgtgccctcctcgacaacgggagctgccctccatgccccctcgagcaaccacacaggcggcacgtcgcccacgccactaccggccctgggcgtcggtctgcatcgtcgccggactgaccgccatctacgcgctactgttgtgtgcgccttcggcagatgacgctaccggctgcacccggccgtgcgacgcggccagcgtgctgggcgccgccatcgccgccgtggaaaacagttacgccgaaggcgatctcaccgtgaccgaccaccaccttggcctacctgacagcgccacgcattgcgcgcacctgcgcgccgcgctccccgataccggtcgcgcagtgctgacctgtgatctgcgccaggacggccgcctgcaatggtggcgaacccctgccggagaatggcgatgcaatgcaggcatggccgatgtggatgcagtgcctgcgccatgccccgcggaattacggcgcactttctgattattcgtaaaacaatcgcgcaaccattcaatagattcgattttaccaattcttgaatatacccaccgccgtgcacgtgatttcctatgactgcgccacgaatgcttgtttcggggccagaccaacgaaaccaccacgccacagaggattatcatgaacaccgcaatcggccgtacacgccacgcaggcaaaagcgcatcccggcagaagggcttttcccttattgaactcatggtggtggtggcgatcatcgggattctggggatgattgccctgccgcagtatcagcggttctcggccaaggcaaagttggccgctgccctcgctgaagtcgctggtggaaaagtcggcgttgaatcactcctcgccgaaggcagcgagatcaccacgccggcatcgattggcctgcccgagtcaagctcccgctgtgacgggattacggtgacgagcaatgtcacgaacggagaaacgagcattggctgcttcctcaagagcgatgccacgtttggcactggctggctgaagttggatcgcggctgggaaggcaactgggtctgcagcagcgacataccggaccagagcctgcttccccaaggctgccaggcctgatcgcgaacgcaagtcactgcgcggactgcccaacctgccacagtcgcatgcgcctttccattgcgtgcgccagccacgattcaaagttgatttcctcatggaggaacctatgaaaaagaaaatctcaagggccggccacgcggggaggcgtacacatcggcaacgagggttttctctggtcgaactcatggtggtcgtagccatcattgcagttctttccctgatagcagtcccgcagtacaagaagttctctaccaaagccaagctggcggcggcgttggccgagctggccggcgggaaggcaggagtagaggcgtggctggccgaacgcggtgatctacatggctcggacaatcgcaagctgggactgccggagagcagtgagcgctgtgaaaccattacaacaatgattgctccggacggcgacctggaaatcaattgcctgctgcgatccgatgctggctacaacctgggcacatggcgtggcaacctgacgctgatcagggattcggacaaccatgaatggcgctgctggactgccatcccctactacgacctcctgcccaaaggctgtggccccggcaatccatagcctgccatgcagatacttcaagctgttcacgctttcccgctccagtcaggcagcggcgcctgcgaaagccggccatctcccctcccctccctcgtcatcgccgatgcaaacccctggatccgacgcgaactgatacgcagactccggccccatctggacggcagaaccctcggcgaagcgcgctcgcccgcagacgttctgacccagatcgccagcccgcgctgcaacgtactgatcatcgatccctgcatgccgactgtgggccaggccgacggcatgccactgctgcgccgcatctgctgcctgcgcagggatctgctcatcctcgtgctggcccaacagcccttgcgtgtactgcaggatcgcgccctgccggcgcagatcggtcatgtctatgccaagacggtgaatccatcgtggctgtgccatgtcgtaagccaggcactgcgcgggggatccgccggcgttacgccaccggcgcaggacgcaggccggtaaccggccccgaggcggttgccatcgcctcgaaatgcacggcatccacgctgctgcccagcgcctccacgcgcaccgtgctgccctggccggtccggcgatggtgggcgctggccaggcctaccgcggcatcgaacgctgcggccccggagttgaatacttcggccacgcctgcggccggatccaacagggaccactgcgcggcactgcacttgacggtaatgaccatgggacgctccttctgggaaaggcgcaggggcattagaccctctgctgatgacgtcaccctagccagcccatcagggcgctcccatcagataagtacgaaaaacccgcgcctgtccgtcagaacaccgccttcatcacatccctgagtccgtttagctcgttcattccgtgatccttgtcacggagtcagctgggcttcacactaccatcatcaacaggggccccttccacatgcgcaccttcttctcgcaccagcgttcgacgttgctgaagttctatttcgtggccagctatctgattctgatcgaagagttggtccgcgccgccgtgcattgagcgcttgctgacgggctatttgcgacagaaaatgttgctttacgcacggagctcgcgcatgaaggtgcttcttctgattccagcgctgctggttctggccgcatgcgcgagcccggacaatgcagccccgcgtgccgacggcaagccttcgacaaccatgcccaaggtaggcggcgatcgcgacgcgcacggctgcatcggctcggccggctaccagtggtgcgaacacagccagcgctgcgagcggccctgggagctggcacaggcacacggcctggccaacagcgccgaggccatcgacgcgtactgcgccacgcccgccagcccggcgcgcaagtgagcacgacccgtcatggctgagctgagtcccctgcccgacctcgcccgtggccggtatcgccacttcaagggcggcgaatacgaagtgatcgacatcgtccgcagcagcgagacgctggaaccattggtgctgtaccgcgcactctacggcgaaggtggcctgtgggtacgcccctacccgatgttcgtcgagcaggtcccaggcaaacacggcccgcaggcgcgtttcgcacgcatcgacgattgatccggctcccaccgggcggtggccgatggtcgcgccggtgacgcgatccggctgcgctacaatcataccgtccagtcggtttcttcccatcatgtccccgcccactccccgctcgcggcgcaaagcgcccgacagcgtgcgccagtcattgctgcacgccaccatcgccgtgattggccagaacgggctggcggcactgaccgtgcaggatgtcgcgcgcgtggccggggtcagcaagggcgcgttgttccaccatttcagcagcaagcaggcgctggtcgatgaagccatcggcgcactcatcggcgaattcgaggcgcgtgtgcgcacgctcctgcaggacggcacgcccggccacggctgcttcagccgcgcctatgtgcgggccaacttcgagcacctgctgcagcaggaacaggacaacgacatcggcctgaccctgggcaacctgatggagccggccctgctggcgcactggcgcgactggaagcgcgcgatgctggccgagttccccggcgaagccgacgatccgcgcctgtacgcggcacgctgcgcggccgatggctattgggccaccgcctatggtcggccgctggacgaagcagagcgcctcaatgcgctggcgatggccgagcaggccctcaagctgtgcgacccgcagtgacccggagcccgcgatgaacccctatatctacctggccgccgccatcgtgctggaagtgattgccacgtcgctgctgaaggcctcggacggcatgagccggctgtggccgacactgggcgcgctggtcggctacgggctgtgcttctacctgctgtcggtcaccatgaagtcggtgccgaccggcatcgcctatgcgatctggtccggcgtcggcatcgtgctgatctcgctgatcggcctggtggtgttcaagcagcggctggatgcagctgcgctggccggcatcgcgctgatctgcgccggcgtgctggtgatcaacctgttctcgcgcagcagcgcgcactgaacacgctgctgcgcgacaggtgctagctgaccttcttcgccacgctcatgccgatcaggaacagcaccacggcaatgatgatgccggcccagaacaggaacttggcgatgcccacagcggcaccggcgatgccgccgaagcccagcacgccggcgatgatgccgatgatggcgaaaatgatggcccacttgatcatgtcagtccttaccccgcagggaacgcaaacggtgtgatcaggctaggccgcagccgatgcggcagtcgtgaaaaggccgcgtgtgcggcgtgaatcagcgcggccggaagcgcagcagcgccaccgcgaaggccaggaacacgcttcccaccagccgctcgaaccagcgccgtgcgaatggctttgcaagccaacgacgcaggccgtggccaccggcggcgtacatcacgtaccagaacagttcgcaggccgcgaaggtcgccaccagcacgctgtactgcacggcctggctacgcgacggatcaacgaactgcggcaggaacgccgcggcgaacaacaacagcttggggttgctcaggccaacccacaggccgccacggaataccgtcgctgcgccatgtaccggcgccagtgtgacctcggcagcatcggccaccgcgggtgccgggcggcagctgtcacgccacgccttgatgccaagccaggccaggtaggccacaccgagatagcgcagcacttcgaacagcatcggcgaggagtgcagcaacgcgctcaggcccgcagcggatgcggccagcaccagcagcatcgccagcaggcagccggccatggccggcacgctgccacggaaccccagcccgacgctgcgcccgaggatgtgcagcatgttcggcccgggcgtcccgcacagcacgaagaccgtggccaggaaccaccaccaggtatgcagggccattgccggtttccacttcagaagacggcaccagcatagggcacccatgcaggacgcggcacatacagcgggcggtggatgcgacggttacagatgccggcgcccgtgcacggcagcgccactgccatctgtgctgcaatggccgtctctggcttggagcagtgcatgaagacccttggcctgatcggcggcatgagctgggaaagctcggcgcagtactaccggctcatcaacgaggcggtgcggcatcgcctcggtggcgcgcattcggcgcaactgctgctgtggtcggtggatttcgccggcatcaagcagctgcagcacgacggccaatgggatctgctgggcaaccacatgctcgatgctgcacggcggctgcaggccggtggcgccgagctgctggtgatctgcaccaacaccatgcacgcgctggccggccggatcgaagccggatgcccgctgcccctgctgcatatcgccgacccgaccgccgcggcgatcctccaggccggcatccgcaaggtgggactgctcggcaccgccttcaccatggagcaggcgttctaccgcgaccggctgcaggaccgcttcgggctggaggtactggttccggaggccgatgatcgccgcagcgtgcacgacatcatctaccaggagctgatctgcggcgtggtcagcgagcattcgcggcaggcgtacgccggcgtgatcgcgcgcctggttgcacgcggcgccgaagcgatcatcctcggctgtaccgaaatcatgttgctggtccgcgccgaggacagcccggtgccgctgttcgacaccaccaccctgcacgccctggcggcggtggatgcggcactggcctgaccctgcgcgctgtcagtcttcgccctgcacttccagtgcggtgatcaaccagtcgaccacggcctgcgaatcacacaggaagaagatggcatcgcccgaacgcgcctcggtcagcagccgatagacggtaatcgccactgccgactggttggcgatgaacacctccgggctgcgcggtccctcgctgtggccggccacggcatgcagcgccttgcgcgcagccacggtggcgggcgggtccgcgctgcgggccagttccggcccgcgcaggccccacgcaatgaacacatgcttgcccttgaacgtggtgtccaggacacgcacctgcccggcctctgcgccagccgagcgatgaatgacggtactgctgatcaacgcaaccccctgtggtcgtcgtggtccgcgcatcctcctccacacgccggctgcacgccagtgacggcagccacaggctgggccggcaagcgtgggagagatgtaagaaggtgtaagccgatgcgatcggatgtgccgcgatgataagggatgtaaggctctgcatgggccggtgcacactactaaatccccactgagccaacgccggaacgatccgttccgatggccccgggctggtccattcttgcggcccgttcccctgccgaggccccccatgacccatcgcctgctgctgccgattgccctccccaccctggccctgctgctggccgccaccacggtggccgcccaggattacgacagcgatcccattgcgccgctgcgctgcgaatcgcagttcaacaagacccagcagtgcccgatcgaaggccgcatgcgcctggccaggcagctgtcggtcacccgctgcgtagaggaccagaactggggccagagccgccgcatgctctgggtcaccgacggctgtcgcgccgagttcgtggccgacggacagggacgcggccgctggccggggcgcggccgggaccgtgaccgtgaccgcgatgacgatggcgagcgcctggtctgcgagtcctacgagcagaaggacaaggaatgccgcatccgtgtgcgccacgaggtacgcctggtcaagcagaagtcggtgacaccgtgcgtcgaggatcgcaactggggctgggaccgccgcggcgtgtgggtcagcgacggctgccgtgccgagttccgtgtgtattgactgccgaccacacgctggctgtggcggatgcgcagacacggccgacgcgatcgatagactgggcgcacccagcccaggagccttcgatggtgccgcccgatccctcctcgacgatgttgcacatccgcgaggcaatgcccgccgacgtttccgcgttgatcgcgctcgacagcgttgcggtccacgatccgcaacgcgcacggcagatcagcgactggcaggcccgtggtggcatgcaccggccgaatgggccggtcagctggccggttacccggtcatccaccatcacttcttcggcgaagccttcgtcgagatgctgatggtggcgcgcgaacaacgcagccagggcgtcggcgccgccctgcagcgccatgccatcgcgctgcacggccacggcaggctgttcacttcgaccaatgcttccaataccggcatgcaacgcctgctcgccgcttcgggtttcatcgacagcggcatcgtgcacggattgaacgaaggcgattcggagctgctctaccgctttgccggcagctgatcgagatacgtggtcacctttgcatccagcaggtccatcaacagcggatccatgcagcgatagtcgtcggggatatccaggcaatgcaggcgcttgtattccagcaggcgcgcataggcggcctgcaggcgatgctggtgcttggcctccatcacgaagatgacatcggcccagcggatatccgccgggccgatggggcgtcgtgcatgcggactggtgccggccgacagcgcagcgaagccgggtcgccgtcgccacatggcttcggcggtcgggctgcgcagctggttgcggctgcagacgaacagcaggttgatcattcctgttcctgcagttggcgggcgctgaggaccggataggtgaagcccagctggcgtgcgcgcgcgagcttggcatcgcgcgtatacagcagcttccagttcttctcgggcttgtagctgtaggcggtcgtggcgcggtcgccaccacggttgcgagcctggctgcgacgccaggcacggtttcttgcagaatccatgatgtgttctcgtgagtaccgggttcagcagccgcggtagtacgagtggcgcgcagcatacaccgcacgcacaaaaaagcccacgcatcgctgcgcgggcttcttgattcatcacagtggtcgggacggccggattcgaaccgacgaccctctgccccccaggcagatgcgctaccaggctgcgctacgccccgactgatgctgcgatgtgcccgccactgcgacgggccgtgaagtatagcggattacgatggaaatgggatcagcggcgcagcaactgcagcacttcttccaactccatgcgcacctgcttgatgatctggttgctcagcgccgattcctcgcgggcatcggggccgtccagacgcaggcgtgcaccaccgatcgtgtagccctgttcgtacagcaggctgcggatctgccgcaccatcagcacgtcgtggcgctggtagtagcggcggttgcctcggcgcttggccggctcaaggctgggaaactcggtttcccagtagcgcaggacatgcggcttgacgtcgcacagctcgctgacttcaccgatggtgaagtagcgcttggccgggatcggcggtagttcgcggttactgcccggatccagcataagcttccaccctctccttgagcttctggcccggacggaaggtgaccaccgtacgggcggaaatcggaatttcctcgccggtcttggggttgcgacccgggcgctggttcttgcgccgcagatcgaaattgccgaagcccgacagcttcacctgacgtccctgttccaatgcttcacgcagcacatcgaaaaacgcgtcgacgaattccttggcttcccgcttgttcagaccgacttcgtcgaacagcttttccgccatctccgccttggtcaatgccattgcctgctacccccgagtgctgcccgctcagccgcggatccgggcgtggtgttcacgctcgatggcagtgaccgcctcggccaccaccgcatccacgtcgcggtccgtcagagtgcgcgacttgtcctgcaaaatcaagcccatagcgagactcttgaatcccggctcgacgccctggccgacgtaacggtcgaacaggttcaggtcgcgcagcagcgggccggcggcctggcggacggtggccgccagatcggcccaggccacctgttcaggcaccaggactgccaggtcgcgacgcaccgccgggaagcgcgacagttcgccggcgcgcggcagtcggcgggcggtcagcggctccaggtccagctcgaaggcgtagacgtcggcttcgatatccatcgcccgggtcaggcgcgggtggatctggccgatccagccgatcgccacgccatcgcggaacacctcggccgaacgcgccgggtggccgtaggcgcggacggacgggcggaactccagctgcgcgccactggcggccgccagcgattccaggtcgcccttcaggtcatggaagtcgaccttgcgggtcggcaggccccactgcaccgcctgcgcctcaccgcagaccgcagcggccacgcgcggggtttccagcggtgccggctggccgtctccggcctgctgggcgaacacgcggccgagctcgaacagacgcacgcggcccaactggcgggcggcgttgcggcccaacgtggcgaccaggcccggcagcagcgacgggcgcatcaccgccagttcggccgacagcgggttggccagcggcaccaggccgtcgcgcagctgccactgggtcagcagcgcgtcgtcgacgaaggcgaaattgacggtttcctgctggtcacgggcgatcagctggcggcgcacgctcagcgcgtccagctgggtctcgctcggcatcgccacgcgcgaggcaccgcccggcagcgtggtcgggatctgctcgtaaccgtggatgcgggccagctcttcgatcaggtcttcttcgatggcgatgtcgaagcggcggctcggcgcgaccacctgccagccgtcggcggcggcgaccacgtccatgcccagcgcgcgcaggatgcgctcgacttccgcatcgtcgatggtgatgccgagcacgcgggtgatgcgggcgcggcgcagcacgatggtcgcccgctgcggcagatcggcttcacgcacggcctcggtgaccggtgccggggtaccgccggccaggtccagcaccaggcgggtggcgtactcgatcgcggtgcgcggcagcgccggatcgacgccgcgctcgaagcgatgaccggcatcggtgtgcaggcccagcttgcggccacgacccatgatcgcggccggcgcgaagtgcgcggcttccaggaacacggcggtggtcgcgtcggtgacgcgggtgtcgaagccgcccatcaggccggccaggccgaccgcgcggtcagcgtcggtgaccaccaggaagctgtcgtccagcgcagcatcgcggccgtccagcagcttcagcgtctcgcccgcgcgcgaacgccgcacggcgatgctgccctgcagggtgcccaggtcgtaggcgtgcatcggctggcccagctccagcatcacatactgggtgatgtcgaccagcagcgagaccggacgcacgccactgcggcgcaggcgctcggccatccacaacggggtcttggcggcagcattgacgccttcgatgacacggcccaggtaacgcggcgcttcggcgccggcgtcgagctggatgcccagttcacggctgccgactgccggaatggcgtcggcagcgaagtccagcacttcactgcgggtggcggcggcgacgtcgtaggcgatgccgcgcaggctgaagcagtcggcgcggttcggggtcagcttgatctcgatgctggcatccggcaggcccaggtactcgaccagggtctggccgaccggtgcgtcgtcgggcagttccagcaggccggaagcatcgttgtccaggcccagttccttggccgagcacagcatgccgttggactcgacgccacgcagcttggccggcttgatcttcagctcgccgatctgcgcaccgaccatcgccagcggcgcgaccaggcccgggcgcgcgttcggggcgccgcacacgatctgcagcagttcgccctgcccggcatcaaccctgcacacctgcaggcgatccgcttccggatggcgcaccgcatcgacgatgcgtgccacgaccacgtggtcgaggccttcgcccagcgcggtcacgtcttccacttccaggccgatggcggtcagcactgcactcagttcatcgcgcgaagcgccggtcgggacgtggctgcgcagccagttttcggagaatttcatggtgtcatcctggtgggcccggcgcatgcgcctgggcctgcgaatttgggagcagccgagcatggctcggccctacacggttgcggcttacgcgaactgtttcaggaaccgcacgtcgttctcgaagaacgcacgcaggtcgttgacgccgtagcgcagcattgcaaagcgctccacgcccatgccgaaggcgaagccggtgtagcgctccggatcgatgccgacgttgcgcagcacgttcggatggaccatgccgcagcccagcacttccagccagcgggtgctgccatcgggctgctgccaggcgatgtccacttccgcgcccggctcaacgaacgggaaatagctggggcggaagcgcatttcgaaatcgcgctcgaagaaggcgcgcacgaactcggccagcgtgcccttcaggtcggcgaaggtcgaatgctcgtccaccagcagaccttccacctgatggaacatcggcgaatgggtctggtcgctgtcgctgcggtacaccttgccggcggcgatcatgcgcagcggcggcgcgtggtcacccatgtagcgcacctgcacgccggaggtgtgcgtgcgcagcaggcggccgtcgccgaagtagaaggtgtcgtgcatggcgcgcgccggatggtgcggcgggaagttcagcgcctcgaagttgtgccagtcgtcctcgatctccggcccttccgacagctcgtagcccagccggccgaagatgccggtgatgcgctccagggtgcgggtgatcggatgcaggccggcgcggtcgccgttgcgacccggcagggtgatgtcgatggcttcggcggccaggcgtgcatccagtgccgcatcttccagcagcgccttgcgctcgccgagcgcgcgggtcagcgcgtcgcgggcctggttgatcgcttcaccggcggccttgcgctcgtcggccggcagggcgccgagctgcttgagctgcgaggtgatgctgccactcttgccaagcagggccacgcgcagctgttccagcacgtcggggctctgtgcggcggccacatcggccagcgcctgggtggtgagggattggatgtcgctcatggggggccggaactccagtcgatctgccatcgcgatgcgcgaagggccgacccctgtcgccaccgccgtccccgcgctgccgccatggcctcgccgggacccaaaaaagaatggggaaggacttgcgcccttccccatgcattgccttgacctgacaccgttccgaatgaacggttacggcatcgggaaggacttatgccgccagcgcgcccttggccttttcggccagcgcagcaaaaccggctgcgtcgtgcacggcgatgtcagccaggaccttgcggtccagggtgatgccggccttcagcagaccgttcatgaagcggctgtagctcaggccgttgatgcgggcagccgcattgatacgggtgatccacagcgaacggaagttgcgcttcttctgcttacggccgatgtaggcgtactgctgtgccttgatgaccgcctgcttggcgacgcggaagaccttgcggcgggcgttgtaatagcccttggcgagatccagaatcttcttgtggcggcgacgcgcctgtacgccacgcttaactcgtgccatttttcagttcctcagaggtaagggagcatgcggtccagacggcctgcgtcttctgcacggacatggcccgtctgacgcagattacgcttacgcttggtcgctttcttcgtgaggatgtggctacggttggcgtggccgcacttgtacttgcccgaggcggtcttgcggaaacgcttggccgctgcccggttggtcttgatcttgggcattgcaatgtccttgatgggatttgaccctggtttctgactgatctggcggcggcctgggccgctctttccgtcctgccatgatcggcgtacgacccgtcctgggtgggtcgagccgggcatgatacaggcaaaaccgccctgccaccagccccagcacctcttgcgccggcatttcaccggcatcctgcaaaagcaaagggacgccagtggcgtccccttaccctgaaccattcagccaggcgccccggaaggcggcccgtcaggcctcaggtcttcttcttcggcgcgatcatcatgaccatctgacgcccttccaggcgcggacgggattcaatgacgatgtcctcgcccagatcggtctcgatccggttggccatttcgcgacccagttcctggtggctcatttcacggccacggaaacggatgttgaccttgatcttgtcgccttcttcaaggaacccgcgcatcttgcgcagcttgatctggtagtcgccctcgtccgtgaccggacggaacttcacttccttgatctcgacctgcttggtcttcttcttggcctcgctggccttcttctgcgcttcgaacttgaacttgccgaagtccatgatcttgcagaccggcggatcggcctgcggctggatttcgaccaggtccaggccttcatcttcggccatggacagcgcttcgtcgcgcgacaacacgccgatcatttctccgtcactgccgatcacgcggacgcgcggcacacggatttcctgattcttgcggttctgtttgttgtcaggggtgctgatattacgttctcccaagggtatcgaaccggtccgggtgcctgtgcgcccggaccggacctttgcttacgcgccctcggcctggagccgctcgatgaaggcctgcaggctcatgctgcccaggtcttcgccagaacgcgtacgcaccgccacagccccattttccttctcgcggtcaccaatgaccagcaggtagggcacgcgctgcaacgtatgctcgcggattttatagccgatcttctcgttacgcaaatccgagctgacgcggaagccttgctccgcaagggttttggtcacgcccgagacgtagtcggcctgggcgtcggtgatgttggccaccaccacctgggtcggcgccagccaggccgggaactggccggcgtagtgctcgatcaggatgcccaggaagcgctccatcgagccgacgatggcgcggtgcagcatgaccggatgcttcttctggctgttctcgtccacgtactcggcgcccaggcggcccggcatcatgaagtcgacctgcatggtgcccagctgccaggtacggccgatggcatccttcaggtggtactcgatcttcgggccgtagaaggcgccctcgcccggcagctcctgccattccacgccacaggcggacagcgccgaacgcagtgcgccctcggccttgtcccaggtcgcgtcgtcgcccaggcgcgattccggacgcagcgcgatcttgatctggatctcgtcgaagccgaagtgctggtagaccgccagcgcctgctggtggaacgcggtcacttccgattcgatctggctctcggtgcagaacacgtggccgtcgtcctgggtgaaaccacgcacgcgcaggatgccgtgcagcgcgccggacggctcgttgcggtggcaggaaccgaactcaccgtagcggatcggcaggtcgcggtagctgtgcaggccctggttgaacacctggatgtggcccgggcagttcatcggcttgaccgcgtaggtgcgcttctccgactcggtgaagaacatgttgccctggtagttgtcccagtggccggacttcttccacaggctcacgtccaggatctgcgggcagcgcacttcgccgtagccgctgctgcggtagaccttgcgcatgtactgctcgaccacctgccacaacgcccagcccttcgggtgccagaacaccaggcccggcgcctcttcctgcaggtggaacaggtcctgctgcttgccgatgcggcggtggtcgcgcatctcggcttcctcgatgcgcttgatgtacgcctcgagctgcttcttgtcggcccaggcggtgccgtagatgcgctgcagctgttcgttctgcgcatcgccgcgccagtaggcgccggagatgcgggtcagcttgaaggccttcaggaagcgcgtgttcggcacgtgcgggccgcggcacatgtccacgtattcctggtggtagtacatgcccatcgcctggatgtcgtcggacatgtcctcgatcaggcgcagcttgtagtcctcgccacgggccttgaagatctcgatcacttcggcgcgcggggtcatcttcttgatgacgtcgtaatcctgggcgatcagctcacccatgcgcttctcgatcgcggccatgtcgtccggggtgaacgggcgctcggaatagatgtcgtagtagaagccctcggcgatcaccgggccgatcaccatcttcacgtccgggtacagctgcttgacggcgtggccgaccagatgggcgcaggagtggcggatgatctccacgccctcctcgtccttggcggtgatgatgcgcaggctggcatcgtggtcgatgacgtcactggcatcgaccagcacgccatcgaccgaaccggcgatggtggccttggccaggccggcaccgatcgactgggcgacgtccatgacgctgacggggttttcgaactcgcggcggctgccgtcgggaagggtaatgttgatcatcgcattggcttcgtgcggggcccgctgggcgggctggaaagcgttcccgggccattgcccgggcaataaaaaagcgccgcgagggcgcctggaatacagggccttcgggggcaggtcaacagtgggcggtggtagtgctcatgtcgcacgctcggccggcgctgggcgcgggccaccttgttccagtcagggttctgcgacgatcttaaaccagcacaccggaaagcccaaggcctaccgtacggtccgctgaatggccctcgctggcggcgtgaaaacgcaatgattaccatgtccgcgcagcccgccccgtgccagcctgcccgcttccccccaggacctcgtgatgcgccacccgctccgaccggctcccgccggccccgcccgtgccccgcgttcgctggcccgctgccatggcggccgcccgcaatgatcaccgtcggcctttccacgctgggcttctgcagcctgggcatgctggcagcgatgttctcggcactggccttctatgccgcctcgccgcactgccgctggccccgcctgcgccgcgccggccgcctcggccgcgagatcggcctggtcgccgcggctgccgcattgtggctgtggatggccgaactcggctttgccgcgggcctggtggcgatgctgtgcacctggatgctggccgcgatgctgctgccggcactggccgcctggcatcgcccgggcacggagtcgccctgatgtggccgcgcgccttcgccggcatcgtggccggcttcttgctggccgccgccgcgaccgggctggtgacgtggttgccgccgggcccctggcagaacgcgctggtgcccagcctggtcacgttcatcccgctgtggatgctggctgccctgtgggcgttcagcttccgcagcgcgctgcgcgcctgggtgacactggccggcagcgctgcggccggcttcgccgtgctgacgctgctgcgcctgaccggcgcggtgcaatgagactccccccatgaagttcagctcgcagaccctgcgtacgttcaccaccctgcacacctgggtcggcctggttgccggcttcggcctgttcgtggccttctacgcgggtgcgctgaccctgttccaccacgacctgccgctgtggcagacgcccggtgcagccaccgcgttgccggcgggcctggacgatgcgcagtacctgctggaagacgtgctggcggcacacccggaagcccgccgccacgtcggcatgacgttccccggcgccgaacatccgcaacccctggcctactggcaggccgacgacggcagctggcgctatgcctggccgggccagatcgccggcagcccgacgccgccacagaccgggctggccgaactggtcaacgaactgcattacagcctcggactgccggtggccggcatctacgtgatgggcatcgtcagcctgctgtatggcatggcgctgctgagcggcctggtgatccacctgccgaagctgttcggcgacctgttcgcgctgcgtccgggccgcaacctgaagcagctgtggcaggacgcgcacaacgtgatcggcgtgctcagcctgcccttccacctgatgttcgcggtcacgggcgccctgctgtgcctggtgttcgtgcagatggccctgctcaatccactgatctacgacggcaaggccctgcaggcggtaccgactgcaatggacaccgcgccggtgcgcgacgccagtggcatcccggcaccgccgggcagcctgcgcctgctgcatgcgcgcgcgcttgaagtagcccgcgcacagggcgtggccaacttcgagccggcctacctgaagctggccaacgccggcgatgccaacgccacgatcgagatcacgggcgaatccaccggcacactcgggccgctcggttcggtggccctggacgtggccaccggcaacgtcctggcctctcagctgccgggccagcgcgatgccaaccacgccacgctcagcgccgcctatgccctgcacttcggcgagttcggcaacggcgtggtggtctggctgtacttcctgctcggcctcggcggtgcgttcctgttctactccggcaacctgttgtggatcgagtcgcggcgcaagcgtcgccagccgcaacagccgcgtgccggggtgaacatggcacgggccacggttggcgtgtgcatcggcctgtgcgtggcgatctcggtcgctttcatcaccgcgctggtgctggagcggtcggcaccgtcggcggtcgaccatggcatccgctgggcctgcttcggcagctgggcagcctgtgcgctgtgggctgcactgcgccgccccgcgcaggcggcgcgcgagctgctgtgggccgcagcgctcagcactgcactggtgccggtcctgcacggcgcactcaatggtgactggctgtggcgcgccgccgcgcgtggccattggccgctgttctgggtcgatgccatcgcgctggccatggccttcggcttcgctcgcctggccgtcgccagccagcgccgcgcccgcaacggcgaccccaacagcgtctgggccaactaagccttcaccgggcatggcccggcgctaccgctgcgggtgttcttcgcccgggtaacgactcacttcgatcaggttgccatccgggtcgcggaagtacaccgattcgatcggtcccagcgcaccggtacgtgtggccggcccctcctccaccgcgatggcctgcgcctgcaggtgcgccagcacatcgaccattgccgtatgcgtgaccaggcacagatcggcactgcccggcgtgggtcgcagcgcatgcggctgcagtggcgcgctggccggatgcaggttgatcttctgctggccgaactgcagcgcggtacggccagcgccgaagcgcacgacctgcatgccgagcacgcgctgatagaagtcacagctgcgttcgatgtcggcgacggtgaggaccaggtggtccaggcgttcgagatggatcatgcccaaagcgtagcgccgccggcgtcgtcgcaatgtgcggtgtcgggtcgatggcgttgccgcctggcgccgggcatggcccggcgccaccagtgactcaatcgccgatgcgcgccttctgccacgggccgagcatcgcgttgagcaggctggcctgctcgtcgtcgccggtcagctcccacatgaacaccccggccaggccctgctcacgggcgaaccgggcacgcaggccgatcgagcgcgggtcttcatagctgatgaagatcttctgcacggcgttgtacagccacgggctcagcgcctgcggctgccagtgcttcacccaacccggctggtcgagatagcgcgccttgatcacccgccagtcgccggcgtcggccggtgcgctgtagggctgatacaggccatccggcgcatcgccggtgaccttgaagccgcgcccatagaacggcacgcccagcaccagcttgtcggccggcacaccgtgctcgcggtagtactgcaccgcgccggccacgttgttccagcgccgcagctccggcgccagcggatcggccggcacttcatgcaggggcgcattgaaggtcgacaccgatgagaagccggtgcccatgtcatagctcatcaggttgatgaaatcgaacaccttggccagcgccggcaggtcgtagctcgccgccggatcataggggccatcggtctgcaggcgaccggcggccagcgcggcgctcagcagcattggctgccccaccttgcgcccgtgcgcatcgagtgccacgcggaacgcctgcgcgagcctggtcaggttggcgcgatcctgcgggcgatgcgccagctccttcggcccgccactgaccgggaactcccagtcgatatccacaccatcgaagctgccggcatggtgatcgaagaacagtgccatgcatgagtccaccaggcgcttgcggctggcctcggtcaacgctgcatcggagaacccacccgcaccccagccaccgatcgaaatcagcgtgcgcaggtgcggatgcgccttcttgagctcggccagcgcggcgaagttcttcggcgcttccgcgccgaccgcgcagcggccgtcctcgatggtggagaacgcatagaacagatgggtcaggcgctcggcgggaatgctcgacaccggatagcgctcggccgagccgccggggtagtaggcaccgaagatcggcggcggcgccggcgcggcgcgcgcagcgatgggcacggcaccggcaatcagcacggcaaggacggccacggtctggcggaacatgggatctcccggttcgaaggcgccgccacgttagcaaaccgatgtggctgtgggacggttgtcgcggcatgtcgtcccgtggacaggcgtgatccgctcaaccgtgacagaacgatggccacgtggcggcgctcacgcactgcagcaggacatgcagcgacctggatgagcggcactgcatgacatcaaggcaaagaaaaagcgggccgaagcccgctttttcatttgcggaagcgtgaggaccaacggtcctcacccaccgcacaatcagcagtaccgattattcggcgctgacggcgtcgccttcttccacggccttcatcgacaggcggatacggccctgcttgtcgacttccagcaccttgaccttgaccacatcgccttccttcagcacgtcgccgaccttctcgacgcgatcgctggagatctgcgacacgtggaccagaccgtccttgcccggcaggatcgtgacgaacgcaccgaagtccatgatcttggcgaccttgccttcgtagatgcggcccggctcgacgtccgaggtgatctgctcgatgcgggccttggcggcctgggcagcgatggcattgaccgaagcgatgacgatggtgccgtcatcctggatgtcgatctgggtgccggtttccttggtgatggcctggatggtcgagccacccttgccgatcacttcgcggatcttgtccgggtggatcttgatggtcagcaggcgcggcgcgtagtccgacagctcttcacgcggagcggtcaggccgtgggccatttcgcccaggatgtgcagacgaccagccttggcctgctgcagagcctgctccatgatctcttcggtgatgccttcgatcttgatgtccatctgcagggcggaaatgccctcagcggtaccggccaccttgaagtccatgtcgcccaggtgatcttcgtcacccaggatgtcggacaggacgacgaagcgctcgccttccttgaccaggcccatggcgataccggccaccggcgccttcaccggcacgccggcgtccatcagggccagcgacgagccgcagaccgatgccatcgacgaggaaccgttcgactcggtgatttccgagacgacgcggatggtgtacgggaaggattccagcgacggcatgacagccagcacgccgcgcttggccaggcgaccgtggccgatttcgcggcgcttcgggcccatcatgcggccgcactcacccaccgagaacggagggaagttgtagtggaacaggaagttttccttgtactcaccggcaacggcgtcaatgacctggccgtcacgggcggtgcccagggtgatggtcacgatggcctgggtttcgccacgggtgaacagcgaggaaccgtgggtacgcggcagcacgccggtcttcacggtgatcgggcggacggtgtccagcgcacggccgtcgatacggaccttggtgtccagcaccgagtcacgcatggtgcggtattccagctcgccgaattccttcgacagctcggccgggttccagccttcagcggccacgcgaccagccagggcttcgaacacgtccttcttgatcgccgagatggcgtcgcggcgctgcagcttgtcacgcacctggaaggcttcgcccaggcgcgggccgatggcttccttcagggcggagatcagcgcttcgttcttggccggggcttcccaggtcgacggcttggtgccggcttcgacggtcagctcgttgatcgcgttgatgaccttctgcatttcgcggtgaccgaaggtcacggcgcccagcatcacttcttcggacagcagcgcggcttcggattcaaccatcagcacggcgttggaggtaccggcgacgaccagctccagctgcgagtcagccagttcgctgacggtcgggttcaggatgtactcgccgttcttgtaaccgaccttggccgctccgatcggacccatgaacggggtgccagccagggccagggcagccgaagcaccgatcagggccgggatgtcaccgtccacgtccgggttcagcgacatcaccgtggcgatgatctgcacttcgttcttgtagtcttccgggaacagcgggcggatcggacggtcgatcagacgcgagatcagggtttccttctcggtcgcacggccttcgcgcttgaagaaaccacccgggatacggccgccggcgtagaacttttcctgataatcgacggtcagcgggaagaagtcctggccttcgcgcgcgctcttggcggcgacggcggtgaccagcagtacggtgtcgtccatcttgacgatgacggcgccgctggcctgacgggcgacttcgccggtctcaagcgtgacggtgtgcttgccgtactggaaggttttggtgatttttgccacggagggtgtccttggggatgctgtctgcgaatttggaccgtcggcgacccttgccgccagcgggtggccggatcgttccggcctgaatcggggattgcggtactacaaaacaaaaccgcggcgcatcgaaaactgcgccgcgggggattcgttgcttagcgacgcaggccaagcttctcgatcagggccttgtagcgctcgacgtccttcttcttcaggtagtcgagcaggctgcgacggcggttgaccatctgcagcaggccgcggcggctgtggtggtccttcttgtgggtcttgaagtggccggtcagcagttcgatgcgggcggtcagcagtgcaacctggacttccggggagccggtgtcagccgcgctgcgcttgttgtcttcaatgaccttctgggtgtcgatcgacatttcttttttctctgtgatgcgtggccggcaggaacgcgcttcgcgcaccgccaggctcgccgtggactacgaggatgaaacctgcgcgaggcaggttgccggaaaacggccgcgaaattgtaacggccgggggcgtcctggacaaggaccggggctgaaccggcaggccccggtcagaggttgaaacggcgctgcggggccagcaggccactctcgtcgacctggcccaggccctggacagcatcgtccggaccgaacacggccaccaggccgcgcggccaggacaggtcgcgctggcgctggcccacgcagaaccggtgggcctggtcggcgtccaggtcgaccctcgggtattcagccaggccggccgccagcggcagcagcaacgcgtccatgccagcctcgtcaccggcctcgaccatcgcccgcagctggtccagggtgaccatggcaggctcgcggaacggctcgacccagagccggcgcagcgcgctgatgtgggcgccacagcccaggcgttcgccgaggtcgcgggccaggctgcggatataggtgccggaaccacaggtcacgcgcagccgcagccgttccggctgctgctccagcacctcgatggcgtgtacctgcacctcgcgctcgggcgcttcgatgacgtcaccgcggcgggccttcacatacagcggttcaccgccctgcttcagcgccgaatagatcggggcacgctggcggatggtgccggtcagcggcgccagcgcagcctgcagggcctgggcactgatcgccggcaccgggcgctgcagcagcacctggccttcggcgtcgtcggtatcggtggtctggccgagcacgatctcggcgtcgtaggccttggccgaacccagcagcaggccagcgatcttggtcgcctcgccgaaacacagcggcagcaggccggtggccagcgggtcgaggctgccggtatgcccccccttctcggcgcggaacaggcggcgcgccacctgcagggcggcgttggagctcatgccggtcgacttgtcgagcagcaggatgccatccaggcgacggaactgaattcgggtcatgacaggaaagtgttgggacgggccatgctcggctgccgcagcgcggcctgcatcagacatcgcgcagccggaatgcagcaacgccgggcatgcccggcgtcgcgcggttattcttcgtcgctctcgcgacgcttctcggcggccagcgtgtcgggcaggtcgcgcaggatgttgtcgatgtgctcaccacgatcgaccgagtcgtcgtagtggaaatgcagctccggcacgtgacgcagcttcatcgcgcgggccaggtccatgcgcaggcggtagcccagttccttcaggccggccacggcttcagccgaacgttccggcatcagcgcggtgacgaacaccttggcatgggccatgtcgcgggtgatttccacgtcggacacgctcaccgagggcaacccgtgctcgcgcacggcgttgtgcaccagggtgccgagttcacggcgcagctgggcggagacacggtcggttcgatggaaagtcttgggcacgaggagctcttggttcagttgtcgcccgaccaacggtcgggcactacctttgattcgattgtcgcccgaccaacggtcgggcgctacgggtacatggtggggcccgaccgttggccgggccaccttgcagcattacagggtgcgcggcacttcgatacgttcgaagcactcgatctggtcacccggcttgacgtcgttgtaggccttcaccgcgataccgcattcggtaccgttgcggacttcctcgacgttctccttgaagcgacgcagcgattccagctcgccctcgaagatcaccacgctgtcgcgcagcacgcggatcggcttgttgcgcttgaccacaccctcgatgaccatgcagccggcgacggcacccagcttcgagctgcggaagacgtcgcggacctcggcgataccgatgatctcttcgcggatctccacgcccagcagaccggaggccacctgcttcacctggtcgatcacgtcatagatgatcgagaagtaacgcaggtcgacaccattggattcgatgatgcgacgggccgaagcgtccgcacgcacgttgaagccgatgacggtggccttcgaagcggcggccgagttggcgtccgactcggtgatgccacccacgccggagtggatcacgttgatgcggatgtcttcgttggacagcgcgaccagcgcctggctcagcgcctgcaccgaaccctgcacgtcggccttgatgaccaggttgaggacctgctggccctcgcccttgcccagggtcgccatgatgtcttccatgcggctgccagcggtggccaccaggcgcgattcacggcgcttggtctcgcgctgctgggcaacgtccttggccaggcgctcgtcctcgacgaccacgaagtcgtcaccagcttccggcacgccggacaggcccaggacctgcaccgggatggacgggccggcgaactccggctgcttgccggtttcgtcgaacagcgcacgcacgcggccgtactggatgccgcacaccaggtagtcgcccttcttcaggcggccctgctgcaccagcaccgtcgcgaccgggccgcggcccttgtccagcgacgattcgatcaccacgcccgaggcgcggccttcatcgaccgccttcagttccagcagttcggcctggatcgagatggcgtccagcaggtcgtcgatgcccaggccggtcttggccgagatctccaccatctgggtgtcaccaccgaagtcttcggccacgacctgctcggacagcagttcgttcttgacccgcatcggatccgcgtcggacttgtcgatcttgttgatcgccacgatcagcggcacacccgccgaacgggcgtgctggatcgcttccttggtctgcggcatgacgccgtcatcggcggccacgaccagcaccacgatgtcggtcagcttggcgccgcgcgcacgcatcgaggtgaaggcggcgtggcccggggtgtccaggaagctgatcacgcccttcggcgtatcgacgtggtaagcgccgatgtgctgggtgatgccacccgcttcgccggtggcgaccttggtgcggcggatgtaatccagcagcgaggtcttgccgtggtcgacgtggcccatgatggtgaccaccggcggacgctgggtggcttcgccctgattttcaccggtcgaggccagcagtgcgtcttcggcgtcgttgtcgttggcgcggatcgccttgtggccgagttcttcggtcaccagcgcggcggtgtcgtggtcgatggactgggtgatggtcgccatcacgcccatcttgaacagcgccttgaccacctcgccgcccttcagcgccagcttctgcgccaggtcggccacggtgatggtgtcgccgatcgccacttcacgcaccaccggtgcagtcggacgctcgaaggcgtgcgggccggcattgttgccaccgcgcgacatgtcgcgacggccaccggcctggttgcgcccgcccggacgaccccgggtgttgctgttgttgctgttgccacgacgcgcacggtcggcggccgacaggtgcatctggccagcgaaacggtcacccgggccacgctcgttgcgcggcgcgctgcggttgttgcggtcgtcgttgcgcggcggcggcggtgcaccacgcggcgcagccggggctgcggccggggtgcgcggcgggcgcggcgcggtttcatcgatcggagcacgcttgggcttgctggcagccagcgtctcggccgccttggcggcagccgcagcttcctcggcagccttcttctcggcctcggcgcgttccttggcggcggcctcttcctcacgggcacggacgatggcttcgtcgcgcagacgatccttctcggccagggcctgctgttcggcaaggttgcgggcacgcgactcttccagcttgcgcaggatgtcggcgcgctcttcgtccggggtcatggcgcgagcaccatccttgacgtaggtacgcttctggcgcacctcgacattcacggtcgtcttgctgcgaccggaattgaccgtcacttcctgctgcttccggcggttgagcgtgatcttcttcgcagactgatcggtctcttccggggcctgctcgggcttgccgtgcgaacgacgaaggaagcccaggagcttcaccttctcggagctggtcacgacctggtcgggaccgctgaacttcatgccggcaccggccagctgttccagcagtttttcgaccggcgtgttgaccagttcggcaagcttgcggatggtggtttgctgcgacattcggatcctatgatcttgtgggcgcccccccgcatgtggaggtggcgcggattctacgccctgagcggctcagggccctgttcattgccggctcattcgccgcgttccagtcgggcgatctcctcggctcgggcggccaggatcagcgcagcggcgcgcgcctgatccagtccttcgataccgaagtccatgacctcgtcggcggccaggtcggacagatcctcgctggtacgcacgccgtggccggccagcgcgtatgcggtggcttcgtccatgcccttcagggacagcaggtcctgcgccggctggccgtcttcaaggccttcctcgactgccagggcctcattgagcagcgcatcgcgggcacgagcgcgcagctcttcgacgatgtcctcgtcgaaaccttccacggccagcagttcgccgaccgggacatatgcgatttcctcgacggtgccgaagccttcgctgaccaggatgccggcgatttcctcgtccacttccagcttgtccatgaacagctggcgggccgcagcctgctcggcttccgacttggcggtgacctggtcctgggtcatcacgttgagctgccagccggtcaggcggctggccaggcgcacgttctggccgcccttgccgatcgcctgggccaggcggtcttcggcaacggccaggtccatcgagtgcttgtcttcatcgacgatgatcgactgcacttcggccggcgccatcgcgttgatgacgaagttggccgggttgtcgttccacagcacgatgtccacgcgctcgccattgagctcgttggacacggcctgcacgcgcgaaccgcgcatgccgatgcaggcgccgatcggatcggtgcgctggtcgtgggccagcacggcgatcttggcgcggtcgcccgggtcacgtgcacaggccttgatttccaccaagccctggccgacttccggcacttccagcttgaacagctcgatcatgaattccggggcggcacggctgatgaacagctgcgggccacgcggctccgagcgcacttcggccaggtagccgcgcacgcggtcaccggcgcgcagcacgtcgcgcgggatgcccttgtccttcgggatgaagccttcggcgttgccaccgaggtcgacatagatgttgccgcgctcggcgcgcttgaccacgccggtgatcagctcacccacgcgatccttccacgcatccacgacctgctggcgctcggcctcgcgcacgcgctggacgatgacctgcttggcggcctgggcagcgatgcggccgaaatccgggttctcgatctgctcttcgatgtagtcgccgacctcgacgccttcggcttcatcgacggcatccatcaggcggatctggcggtccggcgattccatgaccacgtcatcggccaccacttcccagcggcggaaggtttcgtagctgccgtccttgtggtcgatgaccacgcgggtcagcacttcctcgtcgggatagcgcttcttcgctgccgaggccagggcggcctcgatggcatcgaagatcacttcacgcggcacgcccttctcgttggcgactgcgtcgactaccagcaacagttccttgctcattggctcactccgcgcgcggcttctttgccgccggctcgttggaagaagaattcgtgttcggcttcggacgcttcggcgccggaccggtcggcttgctcggggccagccccagcgccacccagtcgggcatgatccgtgccttgtcgatgttgtcggccgacacgaccacttcggccttgtcgacgatgaaagtgatggtccccgccgcctcgtcggtcgcctcgatacgaccctgcaggcgacgacggttgtcctgcggcagcttcagcgtgaccttggccgattcgccgaggtgacggccgaactgctccaggctgaacagcggacggtcgacgcccggcgaggacacttccagcgtgtaattgccgctgatcgggtcctcgacgtccagctgcgccgacacttcgcggctgacccgctcgcagtcgtcgacattgatgatgcgctcgggctgttcagccagcggcacgtcgatgtaaaggcgcagggtcgcaccgccgggggccggcagatactcaacgcccagcagctccaggcccagcgacacaacggtcggggcgagcagattcgcgatgtcggttgccttgtcgctcacagcctgccttgatctctatggttgggtgccggccttggccggcgtggaaacgtgacgccccggaaacgacaaagggcccgttgggccccttttccggaaagactccggtgactggattccggttgcaacctgcattgcctgccggttgcggccctccttccgggtccggactcccgctgggaggccgccttcaggggtactgctaggccgctgatgatagcgactgcaccgcgctggtgcaaggtgcggacccgggtcagatcccttttcccgtggataagggatctgaccccgatcacgcagaaacaacgcagaccccaaagaaaaacgccctcgaagcaggccttcgaaggcgatctctttacttggtagcgggggcaggatttgaacctgcgaccttcgggttatgagcccgacgagctgccagactgctccaccccgcatcagaagcggaatcatgaggcattgctgcgacaaatgcaagcttcccctcattcatcgaaccggttggcgccgatccgacgttggtagcgggggcaggatttgaacctgcgaccttcgggttatgagcccgacgagctgccagactgctccaccccgcaccggaagtgtttgaactgctgccctgctctttcgaggagggctaccgcaacgatgttctggctgaaccgctgcagtgacaactcaggctgcgcatattacacgaatcgcgcagctttgtgtcaacttttatgcaagatgcgcaaatgcctgctggcaccagaccatgatcgggttccaggccaggcccagcgcgagcagcgccagggcattcacgcccagcaccacgcccagcacgcggtcgttgctgcgcggcatggcctcgcccaccggctcatcgaagtacatgaccttgatgacgcgcaggtagtagaagcagccgaccacggcgcacagcacgccgaggatggccagccacagcaggccgccgttgacggccgcgcccagcaccgccagcttggtccagaagcccaggaacggcgggatgccggccagcgacgccatgatgcacagcaccaggccggccatccacgggttgcgggcgttcaggcccttgaagtcctcgatgttctcggcttcaaagccggcacgcgacagcgcgatgatcgcgccgaaggcggcggtggacatgatcgcgtaagccagtgcgtagaacagcgcggcggcgtagccctgcgaaccgccaccggcgatgcccatcagcaggaagccgatgtgcgagacggtggagaacgccagcatgcgcttgaggttgctctgcgcgatggccatcaggttgccgatgaccagcgataccgcggccaggccggcaatcagcagctgcagttcggtcgacagcgggcccacgcccatttccagcaggcggtaggccatgccgaacgcggccagcttcggcgccgagctgatgaacagtgcgatcggtgccggggcaccctggtacacgtccggcagccacatgtggaacggcgcggcacccagcttgaaggcgacgccggcgatcatgaacaccgcaccggtgatcagcagcacgcgctcttccgagtgcgggatggcctcgcggatcacatccaggtgcaggctgccggtggcgccgtagatcagcgacatgccgtagagcagcaggcccgaggccagcgaacccagcacgatgtacttcatcgccgcttccgaggccaggccgctttcgcggttgctggcgaccagggcgtaggagcacagcgccagcagttccaggcccaggtagaccatcagcaggctgccggccgagaccaggatcatcatgccggcggtgccgaacaggatcagcaccgggatctcgccctggaacaggtcgcgatcacgcaggtagcgccagccgtagaccagggtcaggccgctgagcagcacgatcccggtcttcatcacgtccgcggcggtatcgcgcacgaacatgccatggaagacctccccctgcccgcccacgccggtggccagcatgaacagcaccacggccagcgcagcgagcgagaacaggtgggtgacgatcttgttccggttgctgacgaacaggtcgaggatcatcagggcgaaggcgctgccgatcagcaccagctcgggagcgagcggtggcaggtcagcggcggtcaatggcagcagcggcgaggtggtcatcatcaaatcctggaattacagcagcttgctggatgcgatctgcatcgccagcttcgcgatcgagggctccatcaggtcggtcagcggcttggggtagatgcccagggccagcacgccgatggcgaacacgcccagcaccagccattcgcggccgttgatgtccttcagttcggcaacatggctgttggccacatcaccgaagaagatgcgcttgtacagccacagggtgtaggcggcgccgatgatcagggtggtggccgcgcccagggcgatccacggattacgctggaaggccgagaggatgaccatgaactcgccaacgaaaccgctggtacccggcaggcccgcgttggccatgaagaacagcatcgcgaaggtggcgaaccacggcatcacgttgaccacgccgccgtaatcggcgatgcggcggctgtgcatgcggtcgtacagcacgccgacgcaggagaacatcgcgccggacacgaagccgtgcgagatcatctgcaccatggcgccctgcaggcccaggcgcgcggcgtcggcgttgccggcttcgcgcaccagccacagggcgatgaaggtgcccagggtgacaaagcccatgtgcgcgatcgacgaataggcgatcagcttcttcatgtcgtcctgcaccagggcgaccaggccgacgtagatcaccgcgatcagcgacagcgcgatcaccagccaggcccattcctgcgacgcgtccgggacgatcggcaggttgaagcgcaggaagccgtagccaccgatcttcagggcgatcgcggccaggatcaccgaaccggcggtcggcgcttccacgtgggcgtccggcagccaggtgtggaccgggaacatcggcaccttgaccgcgaaggcgatcaggaaggcgaagaagatccaggtctgctccttggccgacagcggcagcgcgtacaggtcggccagctggaagctgccgcccttcatgtacaggtagatcagcgccaccagcatcagcaccgagccgaggaaggtgtacaggaagaacttcagcgcggcgtagatgcggcgcggaccgccccagacaccgatgatcaggaacatcgggatcagcatcgcttcgaagaacacgtagaacagcatcgcgtccgtcgcggcgaagatgccgacggtgacaccttccaggatcaggaaggccgccacgtactggttcacgcgcttgtcgatggcgctccaggcgccgatcagggcaagcacgctgaccagggtggtcagcaggatcagcgccacggcaatgccgtccacgcccaggttgtagccgatcttgtacgccgggatccaggcatgggtctcgacgaactgcagaccatcgacgcctgcgttgtagccgctcagcagcgagaggctcgccacgaaggtcagcaccgctacgcccagcgacgcccagcgggcggtctgcgcatcacggatcgcaaggatcagggcaccaccgatgatcggcagccagatgaggacactgagtagaggccagttcgacacgtcttcttattccgtacaggtcatcaacgcaggtaatgcatcagcacgcccagcagggcaatcaggccgatgatcatcgcgaaggcgtagtgatagaggaaaccggattgggtacgacgcagcacgccggctgcgacgtccacaacacgtgccgagagattgaccacgccgtcgacgatgttgctgtcgatccagcgcgagaccctgcccagcttgacgctgccaccggcaaagccatcgatccacagcttgtcgaagccgtacttgttttcaagcaccgacaccagcggagcaaaggtcttgcgggccttgcccgacaggtccggcttccacaggtagaacagtgcggccagcaggaagcccgcaacggtcagcatgaacgccggagccatcatgccatgcagcgcgaaggcgaccgggccatggaactcctcacccaggaagccgatggtgttcttggccggatcgtagaagtcgacgatgccggtgaagaacgtgtgcgcctggcccttgatggcatcgtgcgcgtggttgccggcccagtcggtgccgtacagcatcgggccgatgctgaagaaaccgatggcgatcgacgggatggccagcaggatcagcggcagggtcaccacccacggggtttcgtgcggctcgtgcggaccgtggccatggccgtggtcgtcgtggccatcaccatggtgtgcatcgccgtggtgggcgtcggcggcgtggtgatcgtcatggccgtggccgtgatcgtcatgcgcgtcgcggaaacgctccttgccgtggaaggtcaggaacagcaggcggaagctgtagaagctggtgacgatcacgccacccagcaccgcccagtagccataggtggccacccagctgttggacaggtgcgcgtgcagctcggccgcctcgatgatggtgtccttcgagtagaagccggagaagaacggcgtgccgaccagcgccagggtaccgatccacatggtgatgaaggtgatcggcatgtacttgcgcaggccgcccatcttgcgcatgtcctgctcgtggtgcatcgcgatgatgaccgagccggcgcccaggaacagcagggccttgaagaaggcgtgggtcatcaggtggaacacggcagccgaataggccgacacgcccagtgcaaccgtcatgtagcccagctgcgacagggtcgagtacgcgaccacgcgcttgatgtcgttctgcacgatgccgatcaggccagtgaagaacgcggtggtggcgccgatgaacagcacgaagttcagcgcggtctgcgacagctcgaacagcggcgacatgcgggtgaccatgaagataccggcggtcaccatcgtcgcggcgtggatcagtgccgagatcggggtcgggccttccatcgagtccggcagccacacgtgcagcgggacctgggccgacttgcccatggcaccgatgaacaggcagatgcagatgacggtggcgatcgaccagatcaccggctcgttcagcagctgcatgcccagcagcgtgccgtcccagatctgcagctgggcgcgcgggtcggccagcatgccggcctgcgagaacacctgcgagtagtccagggtgccgaacacccacagcacgccggcgatgcccagcaggaagccgaagtcaccgacgcgattgaccaggaacgccttcatgttggcgaagatcgcggtcgggcgcttgaaccagaagccgatcagcaggtacgacaccaggcccaccgcttcccagccgaagaacagctgcaggaagttgttgctcatcaccagggtgagcatcgagaaggtgaacagcgagatgtagctgaagaaccgctggtagcccggatcgtcctgcatgtagccgatcgtgtagatgtggaccagcagcgacacgaaggtcaccaccaccatcatcatcgcggtcagcttgtcgaccatgaagccgacgtgggccgagtactggccgacttcgaagaacgtgtagatgttctggttgaacggctgcgccccaccccacagcagctggtagagcgtatacatcgacaggccgcaggccaccgcgacgccgaggatggtgatggtctgcgcgccaaagcgcttgacctggcgaccgaacaggccggcgatgatgctgccgaacagcggtgcgagcaccactgcgatcaacagactcttggagagagtgatttccatctgtggatcagcccttcaacgaatcgacttcgccgacattgatcgtgcggcgtgtacggaacagggtcaccaggatcgccaggccgatggcggcttccgcggcggcgacggtcaggatgaagaacacgaacagctggccggacggatcgcccagctgacgcgagaagccgacgaagttgatgttcaccgacagcagcatcagctcgatcgacatcagcaggacgatgacgttcttccggttgaggaagataccggccaggctgatggcgaacagcaccgcgcccagcgcgaggatatggccaagggtgatcacggctgggtctcctcgccggcgaccggcttgctgttgctgtgcacgaccggtgcttcggcacccatcttgaccatgcgcaggcgctggccggccttgaccatggtctgctggcccgggttctggctcttcacgccggtacggcgacgcagggtcagcatcacggcggcaaccacggccacggtcaggatgacagcggcgaactcgaacggcagcaggtactcggtgaacagcgtgcgtgccagccaggtgatgttggagctgtcggcggcgaccgcagcggcgttgtcggccgggaacggcgtgaccgaacgcgccttgaccccgatcaggatcagcatctgcgccagcatcgcgaccgcgacaatcaggccgaccggcaggtagcgcacccagccctcacgcagcttggtggggtcgatgtccagcatcatcaccacgaacaggaacagcaccatcaccgcaccgacgtagaccagcaccagcgccacaccgaggaactcggcgcccaccagcagccacacgcaggcgatggagaagaaggtcagcaccaggcagagcacggcgtgaaccgggttgcgcacgctgatcaccgcaccggccgaaaccgttgccgcgatggcgaacacccagaaagcgatatttacccaatccatctctcgacctcagcggtaagcggcatcggcggcgcgacgctcggcgatctcgttttcgagacggtcgcccagggccagcagctgcggcttggtaacgatgttttcgccacgattctcgaagtggtactcgaggatgtgggtttcgacgatcgagtccaccgggcagctttcctcacagaagccacagaagatgcacttgaacaggtcgatgtcataacgcgtggtgcggcgggtgccgtcctcgcgcttggccgagtcgatggtgatggccagcgccgggcacaccgcttcgcacagcttgcaggcgatgcagcgctcttcgccgttgggataacggcgcagcgcatgcaggccacggaagcgcggcgactgcgggaacttctccatcgggtacatcatcgtgtacttcggcttgaagctgtacttcagcgtcagccagaggcccgccagcagttcgagcagcagcaggctcttgaagtaatgggtaatcctgttcatcactttagacgcccttttgaatcacgccgaagaacaccatgacggcggtaaccgcgatccacagaatggccagcgggatgaagaccttccagcccaggcgcatgatctggtcgtagcggaagcgcgggaagctggcacggaaccagatgtaggcactggcgaagaagaacaccttgacgaacagccacggcgcgccccccttccagatccagtcgaccagcggcgagacatcgccgaagttgacccagccctggaccgggctcagccagccgccgaggaagaagatcgagatcaggaagctgatcaggatcatgttcgcgtattcggccaggaagaacagggcgaaggcaccgccggagtattcgaccatgtggccggcgacgatttccgattcgccttccaccacgtcgaacggcgcgcggttggtttcagccacgcccgagacccagtagatgacgaacagcgggaacagcggcagcaggaaccagtcgaagaagccggaactgccggcctgcgccatcacgatgttgctcaggttcaggctgcccgaggcgatcatcacgccgaccagggcgaagcccatggcgatttcatagctgatcatctgcgccgaggcgcgcatcgcccccaggaacgcatacttcgagttggatgcccaaccggccaggatgatgccgtagatgcccagcgaggtcatcgccagcaggtacagcaggccggcgttggcgttggacagcacgatctgcgaatcgaagggcaccaccgaccaggccgcgaaggccggggccagggtgatcagcggggccagcagatagatcgccttgttggcgctgctcggctggaccacttccttgaacagcagcttgaagacgtcggcgaaggcctggaagatgcccatgcccacgtacatcgggccgtggcggacgtgcatccagccgatcagcttgcgttcccagaccacgtagaaggccaccgagatgatcaccggaacggcgatcaccaggatcttcaggatgatccagatcagcgcgccgatgtcaccgaggcccagcagccactggtgcagcgggtcgaccgcgttcaacagcaattcgttcatgcagccaccaccgatacgcgagcggcacccagcggcgcggtcgcgccgtggcccgattcaatccagaccgaacccgcagcgacgcgggcgtcgaccaccaccggcagggtggccttgccggcatcggtgccgaccttggccatctgcccttcctgcagctgcaggcgagcggcatcttcagcgttcagcacgatgcgcggggcgttgttgagcggatgcgactgcagcgccggggcgcgacggaccaccgcatcggtgcggtagatcgcggcggtcgaagccacttccaggccttcgccggcaaccaccggctgcgccgaagcggcaacggtgaccgacaccggggccaggctggcgcgcaggccggccaggtcggtgaagtcgaaaccggccacggccagctcgccgcccagggcgcgcagcacgcgccagccttcacgggcctcgcccggcagcttgccgccggcacgggccgactgctcgcgaccatcaaggttggtcagggtggcgtcgatttccggcagcgcaccgatcggcaggatcacgtcggcgacgtcgcgggtcgaggcacaggcgaactggctgaaagccaccacctgggcaccggccagcgccttgcgcgcggcaggggcatcggcgaagtccaggcccggctccaggccgtacaccacataggcctggcgcggctgcgccagcatcgcggcgacgtccttgccagccggcagcacaccggcgcgggtcaggccaacggcgttggcgccctgcgggatgcggcacagcttggcaccggtggcggcggcgaactcacgcgcagcagcgcggatcgcggcagcctgcgggtggctttcggcgatgccaccgacgatcagcacggtgttgttgccgccctgcactgccgaacgcagctcggcgttggccagcgcgtcgacgaacttggacggtgcgacgatctgcttgccggcgatgctgaaggcgaagtcgaagtccaccgggttgacgacatggatcttcgcgcccttggtggtctgcgccttgcgcaggcgggcgtgcagcagcggcagttcgtggcggatgttgctgcccagaacgacgatgcggtcagcgccttcgatttcggccagcggcaggccgaacacttcggcggttgcggcgtcggagaaatcgcggttgttgatgcggtggtcgatgttgcccgtgcccaggcccttggccaggcgggccagcaacgcgccttcctcgttggaagtggacgggtgcaccagcacgcccaggttgtcgccctggttcgccttgaggatctcggcggccgcggccaggccttcggcccagctcacttccttccactcgccattgaccttgcgcagcggcttgaccgcacggtcttcgctgtacaggccctggtgcgagtagcggtcacggtcggacagccagcactcgttcacggcttcgttgtcgcgcggcacggtgcgcagcacttcaccgcgacgcacgtgcaggaacaggttcgaacccatcgcgtcgtggtagcccagcgattcgcgcgcggtcagttcccacggacgggcgcggaactggaacaccttgttggtcagcgcgccgaccgggcagacgtcgacgacgttgccggacagctcggtggtcagcggcttgccgtcaaaggtaccgatctgcaggttctcaccgcggtacatgccacccagttcgtaggtaccggcaacgtcggcggtgaagcggacgcagcgggtgcactggatgcagcgggtcatctcggtagcgaccagcgggcccatgtcctcgtccggcaccacgcgcttgcgctcgttgaagcggctgaccgaacggccatagcccaacgatacgtcctgcagctcgcactcgccgccctgatcgcagatcgggcagtccagcgggtggttgatgagcaggaactccatcaccgagcgctggaacttcagtgccttttcgctgcgggtggcgaccttcatgccgtccatcaccggggtggcgcaggccggcgccggcttcggcgacttctccacgtccaccaggcacatgcggcagttggcggcgatcggcagcttctcgtggtagcagaagcgcggaatcggaataccggccttgtcggccgcctggatgatcatcgaacccttgggcacgaccagcgacttgccatcgatctcgatggtcacgtgatccggtggcacgttcgggtttacgggttgcgcgctcatgcggcggctgcctccaccttcttgccgtcaaccatcgaatgaccgttgacgatgtagtactcgaattcgtcccagaactggcgcaggaagccctggatgggccatgcagccgcttcaccgaacgcacagatggtgtggccttcgatctgccccgccaccgccttcagctggtgcaggtcttccatcgtggccttgccggcgacgatgcgctccagcacgcggtgcatccagccggtaccttcacggcacggggtgcactggccgcaggattccttgtggaagaactggctgatgcggcaggcgaacttgacgcagcagacgctgtcgtcgagcaccacgatcgcgcccgaacccaggccggagcccagtgcacggatggtgtcgtagtccatcggcaggtcctccagctcggccgcggtcagcaccggcatcgacacgccgcccgggatcgcgcccttcagcgtgcggcccggacgcaggccaccggccatttccagcaggtcgtggaatttggtgccgagcggcacttcgaagttgccgccgttctgcacgcagccggacaccgagaagcacttcggaccgccgttggcggtcaggctcaggcccttgaaccactccggaccgttgcggatgatcgccggcaccgaaccgtaggtttcggtgttgttgatcgtcgacggcttgccatacaggccgaaattggccgggaacggcggcttgtagcgcggctggcccttcttgccctccagcgattccatcagcgcggtttcttcgccgcagatgtaggcgccggcgcccagcgcgccgtagatgtcgatgtccacgccgctgccgaggatgttcttgcccagccagccgttcgcataggcgtcggccagggcctgctcgaagtgctcgaacggctcgtggtggaactcaccgcgcaggtagttgtaacccacggtcgaaccggtggcgtagcaggcgatcgccatgccttccaccaccgaatgcgggttgtagcgcaggatgtcgcggtccttgcaggtgcccggctcggattcgtccgagttgcagaggatgtacttctgcatgttgcccttgggcatgaaggaccacttcaggccggtcgggaagcctgcgccaccgcggccgcgcaggcccgaggccttgaccatctcgatgacctgctccggcgggatcttctcttcgaggatcttgcgcagggcggcgtagccaccggtcttcaggtagctttcgtacgaccacggggtgtcgtaatgcagggtggtgtagaccacctggtgcggcagcggcgcggggccgaccggacccttggattcgtggtgatgtgccatgcccttactccagcccgtccagcagctcgtcgaccttttccagggtcagacgctcatggtagtgaccgttgatgaccatcatcggcgcgccgccacaaccggccaggcactcttcctcgcgcttgaggtagacgcggccgtccggggtcgattcaccgtgcttgatgcccagcttcttctcgcaatggcggacgatgtcctcggcgccattgagccagcagctgatgttggtgcagatggccacgttgttgcggcccaccttctcggtctcgaacatcgagtagaagctggcgacctcgtaggcccacaccggcggcaggtcgaggtacttggcgacggcggcgatcagctcgtcggtcagccagccctggttctgctcctgggccgcatgcaggccctgcagcacggcagagcgcttgcggtccggcgggaacttggacagccagtgatcgatgtgagcgcgggtcttgtcgctcagcaccaccatcgggtcgacgtcgcgcgccgcctcgaaattacctgtcgccttcatcggccgacctcagcgaaatgcataacgtgaaattccagaaactgcggcgccggcttgcgccggctgcctgcagcgggcgttggcgtggcggacggcattaccggtcaacctcgccgaacaccaggtcataggtaccgatcatcgccaccacgtcggccagcatgtggccgcgcacgatcgaatcgatcgaggacaggtgggcgaagcccggtgcgcgcaggtgcacgcggaagggcttgttggcgccatcggagaccaggtagcagccgaattcgcccttgggcgcttccacggccgcataggtttcacccgccggtacgcaatagccttcgctgaacagcttgaagtggtggatcagcgcttccatgtcgtccttcatgtcctcgcgcttgggcggagcgaccttgaagttcttgaccatgaccgggccggggttggccttcagccacgccacgcactgcttgatgatgcggttggattcgcgcatttcggcgacgcggaccaggtagcggtcgtagcagtcgccttccttgcccagcgggatgtcgaaatcgacagcatcgtacttggcgtacgggcgcttcttgcgcaggtcccaggccacgcccgagccacgcagcatcacgccggtcatgccccactggtgtgccagttccggagtgaccacgccgatgccgacggtacgctgcttccagatgcggttgtcggtcagcagggtttcgtattcgtcgacgcgcttggggaactcgacggtgaagttctccaggaagtccagcagcgagccttcgcgcgaagcattgagctgcttcagcgccttgcccttgtgccagcgcgattccttgtacttcggcatgtggtccggcaggtcgcggtagacaccgcccgggcggtaatacgccgcgtgcatgcgcgcgccggagaccgcttcatagcagtccatcagctcttcgcgctcacggaaggcatacagcatcacggccatcgcacccaggtcgagcgcgttggagcccagccacatcaggtggttgaggatgcgggtgatctcgtcgtacatggtgcggatgtactgcgcacgctccggcgcctcgatgcccatcagggtctcgatcgcgcgcacgtaggcgtgctcgttgcacatcatcgacacgtagtcgaggcgatccatgtagccgatcgactggttgaacggcttggactcggccagcttctcggtgccacggtgcagcagacccacgtgcgggtcggcacgcatgatggtttcgccgtccatttccaggatcaggcgcagcacaccgtgagcggccggatgctgcgggccgaagttcatggtgtagttgcggatttcctgccggctttcggcggcgttgctggcgaacgcttcgccggcctggtgtacgtggctcacttcactgcctcctgcgcgcgctcaccggctgcggtctgcagacgggcgtcgtcacggatcacgcgcggcacgccgacacgcggctccaccgaggtgaccggttcgtagatcacgcgcttcttttcttcgtcgtagcggacttcgacattgccgatcagcgggaagtccttgcggaacggatggccgacgaaaccgtagtcggtcaggatccggcgcaggtccgggtggccttcgaagatcacgccgtacaggtcgaacgcttcgcgctcgaaccagttcaggcccggccacacgctggtcagcgaggacaccaccggcagcgcttcgtcaggggcgaagcagcgcaggtgcatcatcaggttgtgctggtacgagcgcagctgggcgaccacggcgaaacgctgggtcggcatgtgctgcgggcgggcaccgtcggcaccgttttcctcggtggggaactcgccccacgcgaagcggccctgggccttgccttcgacgccacggctgaagccctgcgaggacacgtcggcggtgtcccattcgtcggagccataaccgaggtagtcgacgccgcacagatccacggcctgctcgaaaccaaactcgtcacgcagcgccagggcggtggcgtgccactcggcggcaggcacttccagcgtcacttcgccgcggggttcgaccacgatgaccttcgcaccagcgaaacgtgcggagagtcggtcgatgaaggatgcttgctctgccatgggggcttggcgcgctcttgtcaggtgaaggggtcagcgggcgatggtctgtgtacgccagatcttcttctgcagctgcaggatcccgtacaccagcgcctcggcggtcggcgggcagcccgggacgtagacgtccaccggcaccacgcgatcacagccgcgcacgacagaataggagtagtggtaatagccaccaccgttggcacagctacccatcgagatgacccacttcgggtccggcatctggtcgtagaccttgcgcagcgccggggccatcttgttgaccagggtaccggccacgatcatcacgtcggactgacgcggcgacgggcggaacaccacgccgtaacggtcaaggtccagacgcgcggcgccggcgtgcatcatctcgaccgcgcagcaggccaggccgaaggtcatcggccacatcgagccggtgcgcgcccagttcagcagtgcgtcgacgctggtggtgacgaagcccttttccagcagcgggttgtcgccttccggccgcaggatgtcatcaacccggccttccggcgacgggttgttcatgaggccatcgagagtctgaatcactcccattccagcgctcccttcttccagacgtaaatgaaaccgaggaacagcatgccgacgaacaggcccatggtgatgagcgaacgggcgcccagctccatgaagacctgggtccacggcacgatgaagatgatttccaggtcgaagacgatgaactggatcgcgatcaggtagtagcgcacgtcgaacttcatgcgcgcgtcttcgaaggcctcgaagccgcactcgtacggcgacagcttttccagatcggggcggcggggaccgaggaatcgaccaaccagcatcagcgtaatgccgataccggtggcaacgatcagaaacagcagagaaggcaaatattcggccagcacagcgattctctcttgcctctgccgccgcgcctgcaggcgctttggcatgggggagtggacgggaacctgcctggcgccttgcgcgccaggcgaacccgctttacttacaaatggtgcccaagaggggactcgaacccctacgacttgcgtcgctaccacctcaaggtagtgcgtctaccaattccgccacctgggcaaacgatcacatcagactatcttcccgatgcgccgcgtattgtaaccggcttcagtgtttctgggagccttccgaaggcttttcttcaccagaaaccgaagattccgcctgagccggcacattcgccgccggaaccggggcggccgggaccggatcggccttcggaacggccggcagttcgcccgccggagccgccggcgcgctggccgccggggcggacatcaggcccaggtcctggtcggccgccggacgggtgccgtgaccggcataccaggccatgaaaagactgatgccgaagaacacgacggccagccacttggtcgacttggacaggaagttcgaggcgccacgcgcaccgaacaccgtgcccgaggcgccggcgccaaagcccgaacccgccgccgcacccgagccacgctgcatcaggatcagcgcgatcatggccacagcgaccagcacgtagacgacattgaggatcaacatcagcattggaaaccgccctcggacaatacttctaggattagttcgcggccgccgcccgtgcgatggccaggaagtccgcggccaccagggaggcgccgccgaccagcccaccatcgacatccggctgcgcgaacagttccccggcattgtcgggcttcacgctaccgccgtaaacaatgggcagtgaatcagcaattctagcatcgaagcgcgcaacttcgccacggatgaacgcgtgcacctgctgtgcctgctcctttgtagcggtacggccggtaccgatggcccagaccggctcgtaggcgaccacggccttggcaaagccggccgcgccgaccagttccagcaccggcgccagctggctggcgatgaccgcttcggtctgtccggcctcgcgctgctccagggtctcgcccacgcacagcaccggcaccaggccggcatgctgggcggcggcgaacttgcgcgcgaccagctcgctgctttcatggtgatactggcggcgctcggaatggccgaccaggccatagcgggccccgacctcgaccagcatggccgcgcagacctcgccggtataggcgcccttctcgttgctgctcacgtcctgcgcgccgaaggccaggctggtctcgccgaagtcctcgaccagctcgcccaggtacggcagcggcggcaggatcaccacgtccaccccctccagcggcagcccggcggccacctgccccagcagttcattggcgaattgacggctgccatgcagcttccagtttccggcgacgatcttgcggcgcatgagcgggtggctcctgtgtgaagtcagccggtcatgatacccgttgcggcaaaaatccgtttccttgtaagcggttacatggattttcagccaacggcgcagcccctcgtggcggaggggggggcggggtttggttggtcgcggagagcccggctcgatctggggcttggccgggcgggtgggactgcgcagggggcgctgcaagcacgtccatgtaagctcgatcgccgcttgctcgtgtgcgctgtcctgcgcacacggcaagaccgggattgggcgtcctgcccaacccgcccgaggcatgcctcgggcccatgcggctcacgcccctgcgcagccccacccgcccggcctctgacacagtccggcggttccgcccgccacgggaagaaaaaagaagagcaagagcaaagacaaaagctgcattccgggttgatgctggctggaccaaccccctaccccacttcgatccgagagatctcatccacgcatggcgtggatctaccgtgtcgagcaaggtcgacacccaccaaccgtcaccgggaaactgtcggaggcggggaggtgtcggatggcggggtgtccgcggcgtggatgccgtggccaagcccccagggatgggtttacggcgtccccgccatccgacacctccccgcctccccacggaacaccccagagccgctttggctttggacttgccggccagcggccggcactaccgcgggtgcagggtgcaaccctgcaaagaaaaaggccgcctttcggcggcctcacttttctttacttcagcttgatctcgcgcaggcgttcctcgaggaagccgtgggcggtgatcgcctccggataccggctcgggttctccggggtgatgcacgagggcagcacgtcgatcaggtagtccgggttcgggtgcaggaagaacggcaccgagtagcgcggctggcgcgccaggtcacccggggggttgaccacgcggtggatggtcgacggatacacgtggttggtcaggcgctgcagcatgtcgccgatgttgaccacgatcgtgtccgcatctgacgtaaatggcacccactcgccgtcatgcgactgcacttccaggcctgcggcactggcgccgaccagcagggtgatgaagttgatgtcgccatgggcaccggcacgcacgttcgggatgtcgtcagtggtgatcggcgggtagtggatcgggcgcaggatcgagttgccgaagttggtcttgtcggcgaagaagtcttccggcaggccaatgtgcagggccaacgcggacaacacgcgcgaccccaggttgtccagcgcctgatacaggccgtaaccgcgctcacggaaaccttcgacctcggccggccacaggttcggcgccatcacgtcccggtacttggaatcgtcggcgatctcgcggccgatgtgccagaactccttcaggtcgaaatgcttggagcccttggcggtttccacgccgaacggggtgtagccgcgggcgccgccgctgccggccacgtggtacttgcgcttgacctcttccggcagggcgaagaaagccttgaaggcatcgtaggccgcgtcgatgtcggcctgcgggatgccgtggttacggatgcccgcgaatccccattggcggtaggccgcgcccagctcggccacgaaggcctcgcggtcgctgtcgaaacgggtgatgtcgagggtggggatctggctcacagcggttcctggcttgtcgttgggtctgagggggccaacgcattcatggcccgcctgaacattgtgacagatcgcccgggggacgccactcgatacacggaaacaaaccgatacaatgcgcgacccgcgcgcggagcaacgcttccgtcacgttggccccgcccctcccctgcaccccctgaacctgccccaccatgcccgcagctgcccctgccgcccctgccattgaaggttccgcccggcgctggcggcggctggcctggtggtcgctgttcatcgtcggcaatgcggtactggccgcggcgattgcgctgggcaatgtaccgctgcgtgacaatccgggcggcggcgccggcctggcctatctggcggtcgccctgcccggccacctgctcgcgttcggtgcgctggccggcctgctgccgctgctgctgggcctgtggccacgcagcgcgcgtacgctgagcatcagcgcggccgtgctgcagggcctgtggctgtgcctgctgctggtcgacgccaaggtcttcaccctgtaccgcttccacctcaatgccatggtcgtgaacatggtgttcggcggcgccctgcaggaccaggttgccctgtcctggaagacctggctgcaggtcggcctgctggttgccgcggtcttcaccgccgagggcctgctggcctgggcgtgctggaaactgctgccggccgcgccgcgccgtcgacgggtgctgcaggcctgggcggtggtcgcgctgctgatggccggcggccaggtcgccacggcctactacgacgcccgcggcgaccgtgatgtgatcgcgcagtggaactacctgccgtgggcgcagccgatcacggccaagagcttcatgcggcgcctgggcgtggtcagccaacagcacgccggcctgcccgacccgcgccatgcgcagctgctgtacccgctgcatccgctgcgctgccagagcccacatcgtcccaacgtactgatggtggtactggagtcgctgcgccacgatgtgctgacaccgcagctgatgcccaacacgtcgacgctggcgcaggatgcgcgcgtcttcgaccaccatttcagcaccggcaatgccacccgctacggcctgttcgggctgctctacggcctgcccggcggctattggccgagcatgcttgacgagcagcgtggctcgcagctgttccaggtgctgggccagcagggctacgacctgcacctgtacggcagtgcgccgttgtacagcccggagttcgatcgcacggtgttcgccgatgtccgcgaccagctgcaccaggggccggcagcgctgaagtcagacggccgcgaccgcgcgatcatcagtgcgctgcagcaggacatccgcgccagccaggccgcgcagcgcccgtggttcggcttcgtgttcctcgactccacccatgcgccctaccacatgcccgagggctatccggcggtggccacaccgatggccgccgatatcgatttcctcaagttcggcccggagcatgacccgacgccggaactcaaccgctaccgcaccgccgtgcactatgccgacagcctgatcggctcgctgctggacgacctgcgcgcacagggcctggccgaggacaccatcgtgctggtcaccggtgaccatgccgaagagttcaacgacctcaagctgaactactggggccacaacggcaacttctccgactatcagctgcaggtcccgttcgtgctgcattggccgggcaaggccgctggccacgacgcacgcaccagctcgcacgaagactgggtgccgacactgatgcgccacgcactgggttgcgagaacgcactggccgattacagcaccggccaggacctgctggccgagccgcagggcacgcgtgcgctggtggtcgaaagctggtcgcagcgcgcggtgcgccatggcgatgccatctatgtgttcgacaagttcggcaacgccaccgccctggacctgcgctaccggccgctgccacagcaggcgcccgatgcggccgccgtacgcactgcatgggaagcgctgacccgcttccgcaaccgctgaccctcaaggatcgatcctgcatgaaccgtccgctgcgcatcctgcacactgaagccgccaagggaatgggcgggcaggagatctacatcttccgccacatgcaggtgatgcgcgcgcgtggccacgaggtggcgctgctgtgccagcccgaagcgcgactggcccagctggcacgcgatgatggtttcaccgtgcataccctgcgcatgggtggcctgctgcgcctgctgcgcggcatctggtcggtctcgcgcctggtgcgccgcgaacgctatgacgtggtcaacaccaccagccgccgtgacgcactgatcgccgccgccggtgcacgcctgggcggcacgccgctggtggtgcgctcgcgccacctgatgagcccggtcaactcgctgctgacctataccggcctgccgcaccgggtgctgaccgtcagcagcttcgtcaagcagttgctggccgcgcgcggcattccggccgaacacatcggtatcgtgccgcccatcgcggtcccgccgcgctggagcgaaatccgcaaggacgacccctggcaatgcctgcaggaggtacgcgcggacgtgcgcgccgaactcggcttcggcgaacaggacatcgtggtcggttgcgtggcggtgctgcgcgaacccaagggtcatgccgacctgctgcaggcgatggtgccgctgtgcaagacgcacccgaacctgcacctggtggtggtcggcgatggccagccggtcatggaccggctgcaggcgctgcgcgacgagcacgggctgcagcagcaggtccatctgctcggctatcgcgatggcgcatgccggctgatggctggcttcgacatcttcgcgctggcatcgcacaaggaagcggccggtaccgtcttcctggaggccgcctatgtcggggtgccgatcgtggccacgcgggtgggtggcgtgccggagatggtggtggatggcagcaatgcgatcctcacccggctgggcgacaatgcagccctgacaggcgccctgcgcctgctggtggacgatccggaacggcggcggcagatgggccgcgccgggtgggactggatgcgcagcgcgcaccggttcactcccgacggccacggtgagaccaccgaacactattaccaccagtggctgaaggagctgggacatggctgatgcccgaaccgtaccggtgctgatgcaccaccacgtcagtccgtcgccgggcatgatcaccgtgtcaccggagaatttcgaaagccagatcgcgtggctggccggcaacggctggacgtcgctgacactggaccagtacgccggcttcctggccggcaagccggtgccgcgcaagtcgatcgtgatcaccttcgacgatggctacctggacaactgggtgtatgcgcacccgatcctgcagaagtacggcatgcacgcggtggtgttcgtggtcaccggctggatgggcgaaggcccggagcggccccacgccgggcttgccggggcaacgttgcctgccacgccggaccatcgcggctgcgaagcggcgatctacgagcagaaccgcagcgacgacgtgatgatgcgctggagcgaagcgcgcgcggccatcgccgccggcaccttcgaagtgcattgccacacccatacccacacccgctggctgcgccgcgacgacctggaccgcgcacagcgccgtgccggcctgagccacgacctggcagtctcgcgcaacgtcctgcaggacaagcttggcgaggtgtccgatacgctgtgctggccctacggcgatttcgaccaggaccacatcgaggtggcgcgcgagcacggcttccgctacctgcataccacccacccgttcggacgcaatgtggtgggcggcgacccggagcgcatctatcgtttcgcgatccgcaaccgcccggccagctggctgcgaaaacgcatcgcacagagctacaacccgctgatcgcaccgctgttcaatggcttcaaggcacgccagaagaagatggtgccggggccgtaggcaacccaccgccctgccccttcaacgaaaacgccccggcattccggggcgttttcgtagggcggatgtgcagcggcctcaggcggcggcttcacgtaccgccgcggacagtcgatccagcgtgtcctgcatcagcgtcgcatcatcggcctcgaccgtgacccgcaccaccggctcggtaccggacgggcgcaggaacgcacggccacgaccggccaccgactgctgcgcgacagccagcgcggcctgcacgctgccggcctgcaccgtggccttggccgagacattgcccagccgcacgttgaccgtcttctgcggcacccgcaccagtccttccagcgcctggcgcagggtctgcccgctgttgcgcaatgccaccagcacctgcagcgcgctgacgatgccgtcgccggtggtggcccgatccaggcacagcaggtggccggaggcttcaccgccgagcacgccgccgccttccatcagcgcctggtgcacgtagcgatcgccgacattgctgcgcacgaacggaatctgcaggtcggcaaatgccttctcgacgccgtagttgctcatcagcgtgccgaccaccgggccgcgcaggcggccttcggctttccatgcacgggccaggatatacagcaggtcatcgccgtcgaccgggttgccctggtcgtcggccatcagcacgcggtcgccatccccatcgaaggcgatgccgagatcggcgcgggtttcgcggaccttggccgccaggttgtcgatgtgggtggaacccacgccggcgttgatgttgacgccgttgggctcggcaccaatgccgatcacctcggcgcccagttcacggaacagcagcggcgcgatctggtaggtggcgccgtgcgcgcagtccagcaccaggcgcacgccacgcaggtcgaacgcgcgcggcacgctggccttgcagaactcgatgtagcggccgaccgcttcgcgcgcacgcgacgccttgcccagcttttccgattcggcggtggtgaacgggatgtccagcgccgcttccagggccagctcggtcgcatcgtcgagcttctcgccctgggcggagaagaacttgatgccgttgtcgtagtgcgggttgtgcgaggcgctgatgacgatgccagcgtccacgccaagcgtacgggtcaggaacgccaccgccggggtcggcatcggccccagcagctgcacgtccgcaccggcggcgaccaggccggcttccagtgccgcttcgaacatgtaaccggagatgcgggtgtccttgccgatcaccacgatcggccggcgcccatcctggccgcgctggtcgaccaggacacggcccagggcgttgcccaggcgcagcacgaagtcggccgagatcacgccctggccgacccgtccacggatgccatcagtaccgaagtacttgcggcctcccatcaagccacctccggcgccggctgacggcccagcattgccagcagatcggacaggcggtcgcgcatttcgcgacggtcgcagatctggtcgatggcgccgtgctccagcaggaattccgagcgctggaagccttccggcagcttctcgcgcacggtctgctcgatcacgcgcgggccggcgaagccgatcagcgcctgcggctcggcgatgttgatgtcacccagcatcgcgaaggaggccgacacgccgccggtggtcggatgggtcagcaccgagatgtacggcaggccggcttcacgcagcttgcccagcgcggccgaggtcttggccatctgcatcagcgagaacaggccttcctgcatgcgggcgccaccgctctgcgagaagcacacgtagggcgcaccgatctcgaccgcggtttccgcggccagtgcgaaacgctctccgaccaccgagcccatcgagccgcccatgaaggcgaagtcgaacgacgatgccaccagcgcacggcccttgagcaggccgcgcatggcgatcagcgcgtcgtactcgccggtgttcttctgcgcgatcttgatgcgctcgctgtacttcttctggtccttgaacttgagcaggtcggtcggccccaggcgcgcaccgatctcggtggtgctgtcggcatcgaacagggcagccaggcgcgcacgcgcacggatcgccatgtgatggccgcacttcgggcagacttccaggttctcttccagttccggacggtacaacgcgctgccgcagttgctgcacttttcccacaggccctcggggacactgcgcttcttgctgggggtgttgtcggtgcggatgccggacggcatcaacttgctgagccaactcatgcgggaggacacttccgttcagggcggcccgggggccgcaaaggcggacagtctagctccgctttccccgcccgtgcacccccttgccagccacggggcagccggaaaaaaccatgctgggacgtacgtttaggtgctggggcggtgcccgccgctggccggcagcccttgcgtgcagaccgatgggtagtgccggccgctggccggcagcccttgcacgcgagccctcaggaggatgccggccagcggccggcactaccgttacgcgtccagcgcctgccgcagcggggcgaggaaggcccgggcgtgctgcgcggcctcttccgccgagcccgcttcggccagcgccgccaccagcgcgctgcccaccaccacgccgtcggcctggcgggccatggccgcggcactggcggcatccttgatgccgaagcccgccaccaccggcaccgacgcacgcgcgcgcaacgcctgcaggcgggcactggcggcatcgctgtccaggcgctcggacgcgccggtgacaccggcaaagctgacgtagtagagatagccacgggccagcgccagcagcttgtcggctcgcgcctcactggtggtcggcgacgccagcagtaccagcgcaaggccggctgcgtcgaacgcctgctgggcgtcgcccgcttcttccggcggcaggtcgaccagcagcacgccgtccacgccggcgtcgacggcggccttggcgaaggccgcgtaaccgtggatctccaccgggttcaggtagcccatcagcaccacgggggtctgcgcatcgcgctcgcggaactgcgccacggcctgcaggacgtagcggctgccggcgccgcgcgccagcgcgcgctcggagctgcgctggatggtcgggccatcggccatcgggtcggagaacggcacgcccagttcaatcacgtcggcgccggcgtcgaccagtgcgtgcatgaccggcacggtggcctccagcgagggatcaccggccgtgacgaaggggatcagcgccttgcgctgctgttcgcgcagacgctggaaacaggcatcgagtcgggatacggacatttcaggcacatccttcaatcagttcaatcgcatcgctggttccccagtacatctgggtgacccgcccttcaaacagttccacgcggatacccaggtccgaacccgggtcctgccaggtgaggtactcgccctggtcaccgtcgtaggcatgcgggctggataccggcggcttcgggaactgggccatggcctgggcgcgggtcatgccgacacgcagtccgaacggaccgggctgctgggtcggcgccccgctgtccggatccaggccgagatcgaaacggacgacgcgatcttcatcggtcatcatcgacacgccgggcggcagccccttgccgtcgtagtactcgcaactgccgccgatggcttcgaccgccccttgcgcggtccacggcccgagtgccttcagatcgctcatgtgctggccgatcagcacctcgccggcatggtccagcgccaccgagaccaccgcaggcgcgccatcgctgtccatatcttccgtggacggcggatcgacgatcggcgcacgtgccatcgggtcgaggtcatcattcgcggccgcctgctgtgccggctgcgtggtggccttggcggccggtgccagcagcggcggctccggcggctggcacgcggccaaccccagcgccagcagcagcacgccactgttgcgcagcagcgcgctcacagcaccagcccttcgcgcgcggcgatggtatgcacatccttgtcgccacggccggacagattgcacagcacgatctggtcacgcggacgctcacgcgccagcttgatcgcctgcgccagcgcatggctggactccagcgccggcaggatgccctcggtatgcgccagcaggtggaaggcctgcagtgcttcttcatcggtgatgccgaggtagcgcgcgcggccggtatcggccaggaatgcgtgttcggggccgacgcccggatagtccaggccggccgacaccgaatgggtctcgatgatctggccgtcgtcgtcgcacagtacataggtgcggttgccatgcagcacgcccgggcgaccggcggcgatcgatgcagcatggcgaccggtgctgatgccatcacctgcggcctcggcgccgacgatctcgacctggcggtcgttgaggaaggcatggaacaggccgatggcattgctgccgccgccgacgcaggcagtgatcgcatcgggcaggcggccgtactcggccagcatctgctcgcgtgcctcgcggccgacgatggcgttgaagtcgcgcaccatgcgcgggtagggatccggaccggcgaccgtaccgatgatgtagaaggtgtcctgcacattggtcacccagtcgcgcatcgcttcgttgagcgcgtccttcaaggtggccgaaccggaggtgaccggcaccaccgtcgcgccgagcagcttcatgcggtagacgttgatcttctgccgctcgatgtcggtggcgcccatgtacaccacgcattccaggcccagccgcgcggcaaccgtggcgctggccacgccgtgctggccggcaccggtctcggcgatgatgcgcttcttgcccatccgcgccgccagcagcgcctggccgatggtgttgttgatcttgtgcgcgccggtgtggttcaggtcttcgcgcttgagcaggatctgcgcgccgccgacatggtcgctcagccgctgggcgtggtagatcgggctcggccggcccacgtagtgggccaggtcgcggtcgtaggcggcctggaaggccggatcctggcgggcctggtcataggcctgggcgagttcctgcagcgggccgaccagggtttcggcaacgaagctgccaccgtagcggccgaaatggccctgggcatccgggaaggcgtggtagtcggcaatgggggaggcagacatggaagcgaccgctggttcgagacaggtggatactctagcgcacgggtcgtgaccggaaaatggatattatctggcatataccgtcaggaaatctcacatgagccgttcgctgttgccaccgctcaatgcgctgcgcgcgttcgaggccaccgcccgcctgggcggggttggccgcgccgcgcaggacctgcacgtgacccacggcgcggtcagccgccagctgaagctgctggaagaccacctcggcctggcgctgttccagcgggccggtcgcggcctgcgcctgaccgctgcgggcacgcgcctgcaggcagcgtgcagcgaggccttcagcggcatcgaagactgcgtgcgcgaactgcgccggccgaccgcggccccggcgctggtgctgggctgcagcggcagcgtgctggcgcgctggatgattccgcgcctgcccgcactgcaggccgccctgcccggcgtgcgcctgcagtggtcggcgctggatggcagcttcaccgaggcgcaggccgcactggacgcggtgctgctgctggcgcaggggccgtggccccggggctggcaggtgcgtgagctggcgccggaacgggtcggcgtggtggtggccccctcgcatccggccgcgcagcgcctgcggcacgtgccgccctcggcgctgctgcaggagacgctgctgcacaccagctcacggccgcaggcatggccggcgtgggcgcaagcgcacggtctggacacctcgaagctgcagctgggtactgccttcgaacacctgtactacctgctggaggcagcggtggccgggctgggcccggcgatcgcacccgagccactggtggccgaggacctggccgccgggcgactggtcgcgccgtggggatttgccgccaccggtggcttctgggtgctggcgcgaccggatggaccggcagatgggcgcgtggatgcgctggccgactggctgggccagcaactgcgctgacaacaaaaaggggacggagggaattaagtcgcaagtggcacaaacgacttaatcccctccgtcccctttttttcagctggcagtcggggtggccagtcgctgctgcaggtcttcgcgcaggcgcgacagctcgacttcggcctgctgccgctgctgcattccttcgcgatggatgctgcgcacttcctcgaccgtggcgatcaactggtcgtgcacgtggcgcagcgtggccacgtcgatcacgccgcgctggttgctgcgcgcggtatccaccgaggcctggcgcagcaggtcggcgttgcggcgcatcagctcgttggtggcatcgtcgatggcggtggacagctcgaccgcggccttctgctcacccagcgaaagctggatggcgaactggcgcttccacgacgggatggtgatctcgcgcaccgtgttgaacttctcgatcagctgcagcgcgttggcctggatcaggcggatcatcggcagcgactggtcggccgcatgctgcatcagctgcaggtcggacacgcgcttttcgagcaggcggatcgcgttgtcgacttcgctctggcggatgcgctgctgcggatcctcactgccctgcccggcctgctgctcggcctgcagttcggccaggcgctgcttgccggccgcagcatacaggcccagcgcatggcgttcttcgcggacgatgtcatgcatgcggtcgaactcgcccacgcgcttgcccatcaacgcctgctgcacaccgacatcacccagcagctgctcgatctgcgcattggtgtcgctgaacttctgcaccagctcgcccttggatacgcgcaggcggtcgatcaggccaccgatcaccggcaccttcgaccgctgcgcgaagccgtccagcttcaggctgcgtgcgatgcgcaccacttcgcccagtttctcgccgctggcatcgaggtcacgattgcgcacctggtccagcaactggctggaaaacgctgcggtgcgcgtggccgcttcgcgaccgaagacctgcaggttgcccgggcgcaggtcatccagctccagacggatctcggcgatgcgcggcagatcctcgcggaccaggccaagcgcctgcaatgcgccttcatcgagcggaacggcggtagtcgtgccgggcacgagggcaccgggggtctggctgtcctgggtcatcgggcagtctccttgcagttgggtaagcggcagcggcggccggctcaaggcagtctagcctgagccgccgcgacctcgtcatcgatctgtgcgtgcagcgtggcggccttcgccgccaatgtggcgccggccgcggcctggcctgccgcggcggcctgccgccaggctggcaacaggacgtcatggatgcgcgcgaagcgttgcagcagcacgttgtcctggtcctgcaggagctgccactggccggcctcgagacggcgcagcgtggccagccggcgcaggtgatcgagccgttgcgacagcgcggcctggccggcggtatccagcgacgccagccgcaccgctgccagctcgacccaggcgtccagcgctgcggccgccgctgaatgtccggcgatggccatggcccgcagctgcagctgctgctgcagctgctgggcctgctcgcgcgcctgcagggccagcacgcccagctgcgactgcagcgcacgtccttccgcctcgcgatcgacatcgcgccccagcaggcggccccaccagcccgcctgctgccggatctgcgccgggttatcggcctgcagggccagcgcgatgcgtgccagtgcggccaccagccctgcgcccgcgcccggcggcaacggtgtttcgcgccgcgccagcgcctgcagcaacggcgcaccatagtcggccagcgcggcgacatcggccgtgtccggcaagctcggtggcggcagtggcgcctgcatggtcacggcagcggcggcggcttcggtgtcgtcgctggaatctcctcaccgtcgtccggcggcaacgactcgccgtagaagtgacgcatcagcgcctcatccagcgcgcgctcctccggcgtcgtggcacggcgcacacgcgcacgctgcgccaccgcactgttcggcaccccacgctcgacctgctgccgcgcccagccggcgaacgcggccagggtctgcgacacctgtgcctgctgcgcctgcgatgccgccaacagttccaccaacggtgccaggccagcctgcaggtcgtcggccaggaccgtcgtcggcacactggcggctgccgcgaccggcaccggcgcggcgggcggacgtgtttcagaaagacgatgcagggcctccagcaacgccggccacggtgccgggtcggcaacggcaatcgcttccggcgccggcggtggaagctgcagggcggtggcgatgtcggccagctgcgcgaccacgcgcccgccgacatcgctgtcgtcggcccccatggccttgttgcgcaggaagtcgcgcttgatctgcgtccagcgttgcgcctgcgtgtcgtccagcacgccgcgcagctcggccagcttcaacaggttttcttcggcgccggtggtcagcagctgtgcctcgcccaggtagtggtcggagatcaactgctccagctcatcctcgttcatcaccggcgagatcttctcggcgagcttgttcatgttgcggtagctaccctgcagccggaacggcggctcggtgcggtagcgatcgtcctgcgcggcactggcgatgtactgctggttgacgcggtagaccacgtcgcgcacgcgcagcatgcgctgcagggtggcggtgatttcgttgatctccgcgctgctgtaggcgtggctgaggccgttggtcgagacctccttgcccatcgcccggtcgaccagcgtgtacaggtcagccatgtcgcgcgtagccagcggcgccagcaccgggttggaagtcaggctgttctcgatgtagctgagggtaaaggccgcctccatgccaccgagcacatcacccaggttgtagatgtcggcacggttggccagcatgtccggaatcttgaacacctcgccagactcggtgtacggattgccggccatcaccacgcagaatttcttgccgcgcatgtcgtaggtgcgggtgcgaccgcgccacacaccctcgatacggcgggtgccatcgcacagcgagatgaacttctgcaggaactccggatgggtgtgctggatgtcgtccacatacagcatggtgttgttgcccatttccagcgccaggttgagcttctccagctcctgccgcgaggtcgcgtccggtgcctgggccgggtccagcgaccgcacctcgtgacccagcgccgggccgttgatcttcatgaagaccaggcccaggcggtgcgccacgtattccatcagcgtggtcttgccgtagccgggcggcgaaatcatcatcagcaggcccatcaggtcgctgcgcttgttctcgccgaccgtgcccatctgcttggccaggttgtcaccgatcacgcccaggtagacatcattgatcagcttgttgcgtacgaacgaggacagcggccgcgccttgaactcggaaagccgcagggtctcgcgctcgcggccgatgatgccctggcgcagcgcctggtaggcatggaacgctggcacgaaatgacgcaggtgctgcttcaggcgcgccaggaaatcatccagcgataccaccagcgtgccgttgctgatgcgggcgtgttcacccagcaggccactgacctccgcctgcagcgcggcgtcgctggcacgggtacgcagctggcgctgcaccagcagcagtgctgcagcctcgtcgacgtagccggcatgcggggcatgcgccggcatccgcgccagcgcccgcagccactgaccggccagcgcccagcgcgtggccagcggatcctggctgcgctgcagggcgcgttcgaccgcctcgcgttgcccggcctgttccagctgccgagccagtgcctccagcagcgctacggcatggcggctgctgctgaacaccggttcgccggccgttagttcctcgcccagataagcggccgcggcctctgcggcatcggcatcgaacggcaacgcgtgggattgcgcatacgccagcagtgcctcggccatttccgcacgcaacgccaggcgcccttcatcggaccccagcaggcgtgccagcgcttcagcacccatctggcgggccggccattgcgccaccgcttcgcgccgctgctcggcagcccagaacagcaccgccagcgcacgcacccgcggtgcatgccgcaggctgccggccgcctgctgcaagggcagcaacgcacgcaggatcagcgcggcatcatggtcatggatgccccgctcgtagccttcgcggtagcgcggtgcggcaaacgcacgcacgcgctggtccagtgcttcgggcgtggcgacgtcgtgctgcagcgtggccaggtcaagcccgtcgctcccctcctgcgcggccatcaacaggctgccggcaagatactcgccgcgatacagtgcaggtgattcggagtccagggtgaccggccagaacggcttcagcgcatccagctccggatcgtgcagggtctccaggaagtcggtgccggtcagatggatcgccagcgtgtcaccacgcggcagcagggtcaggtccagcgcctgggtgttgacgctgaagcgatggcgcggccccagccgcaccacgttgccgcccgcctcgtacagatcactgcggtcacgcagctggcgcaccgcctggtcacgcacgcccttcaggcgcgcttcgatgtcgtcggccttgacgttgtcatgcaacgcgcgcaggcgttcggccagctcacgcagcttgaggatcagcggatcgccggcaaagaacgcattgagctcatcggcggtggcgaagcgctcggtgcgcttggccaggccatcgaggatgcggctggccgcatccagcaccgaacgtgccttgcgctggcggtcatccagcagcgcctgcttgtgcgtttcgaaggcttcaaccagctcttcgcgcttgctcaggatgtcgccgaggaactgctcgtgttcgccgaactggctctccagctcctccagctgcaccagcaggcgcgacagctgctcgtcggcacgctccgggtccgtggccagcgccagcgcgctggtgatcgactgcgagaacagcgcgaactgcgcggcgaactgcgccacggcctcggctgagccgagcgacctgcggcgctgatcggcacgcgcgcgggcctggttgaggcggccgtacagcaccgaaatggactcgaccacgcgggtgcgggcggtggcatcgtccaccttcaggccggccatcagttcagacagcatatccagatcggccgccatcccgcgcagcccctccagctgctcatccagctggcgggcactctgcgcctgctgcgcagcttcatccagcgcctgcaggcgcgtggtcagcggcaccagcgcggcatcgccggcgaggaagtcacccgtggcggcgccgacacgatcctgcgcctccaccagctcggccgtcatcgtctcgatgcgcgcggtgtcgatgtagcgcagctcgcggatggtcagcagccgtccacgcaatgcggtgatcgcattgagggcctcgacgaaggcctgcacctcgttccagttctgcggctgcagccggcccagcagcgccttgtgcgcggcctctgcctcgaccatcgcctgcgccgactgctggcggatcgactgcaccttctcgtactcgtccagcaccgattcgccggtggcgctgatctgccgcagcagcgcctcggcgccatcgcaggccgcgtcgcccagccagtggtgggcatcgaacaggcgccgggtgtcggccaccaggcgctggtagcgctgcaccgacacgtcctggccatcgatctcgcgcgccaggttgaacaggttggagatgccccgcaccagttcggcgttgccgatgcgtcccatgaaggtgttgccgggtggccggcttgcagcaaactcgtcactgctgaacggggtctgccagacctgcatcggatggatgcgggtcggttcgctgccttcggcatggaacagcaccatgcgcccgtcctgcatcaaggcgtagccatggccgaacaccgggttctgcagcacgcgctggatggtgttgtagacgaacagcgccgagcgcccgccttcgcgttcgtagaagatgtacagcacgtcctcgccgttgggcgaacggatgctgcgcttgaactgcatgccggccatcgaggcgtcgaacgccttgtgctcgccgccctgcaggtaatagccacccgggaagatcacgccgtggtcttcgggcagctgcacgcaggcctgcacgatcgcatcgttgcgcacgatgccgccggtcagcgtgttgtagatcagcccgcgccactccgtctcgcggtacggcagcaccttcagcagcaccagcgagccgacccgggcgaattcgaactgggcgtcgtccagcgactgcgtgctgtcctccaccggttcgctgtagatgccctgcccggtctcggtgttgttctcgaccttgatcgtgaggtcgccgccggtggtctccacgaacagggtatcgaggatgttcaggtgcgaatggcggccattgaccgccaggtcgcgggtcgcccgggtccattcgaagtcgaacggcggcggcagtgcgatatcgcgctcaccgcgcgcatccagataggtcagttccccatcgcgcgacagcgcccagcggaacacgcgcacgtcgctgctgcgctcaccgatctggaacgacgccagcagcttgtcccccaccacgatcagctgcagcaggcgcgcgtgcttgtagtaggcgtacagctcgttgaagtcgtgcacgaagccgggctggtcgaggaagctgcccttcagctccagcgccgccacatcgtagccgtcgctgccctgcaccagccggtacaggccgaacacgtcctcgatgcgggtctgggtcttcagcccgatgaatacgttgtagccgaacagcaggcggtccggcccgacctgcacgatgtcacggccgacgcagttgttttcgctgcggatgcggaagcgaccgaccacctccaggcggctgtcgccgaactcggccaggcgctggcggttgagcgtttcggccaggccctgcaggcgctggccctgctcggccaggcggcggcgcaggacttcataggcaccgccctgggcaacggcctggtcgacggtagtgccgccggcctccggtgcagtggattcggcggacggatgggtatcagacatcagcaggcttccggctcacgggcggacggccgcggttgcggccggcgcgggcgggcgatggccgcagcagccatcgcccgatgcatcaacgggcgctgtcgaccacggtggccgacacggtcggcaccgcttcggcatcctcggcgatctggcgcggcgccggttcggccacggccacgcccaggtagcgctgcatcagctcctgcacgatcgggctcttgccggcaaagccttcgatcgacttgcccagcgacaccgccttgaccaggttctcgaacatgccgccgtcgccaccgaccagatcgatatcggcgttgcgcagcgcgctggcgatgacgttggcgttctcgcgcgagacttccttgccggcttcgatcgaggccagcgcctgcttcaggctgttgtccagcatcatgcggaactcttcgtggccacgtgcctggtcgctcagcgaagcgatcgcttcgaacttgcgcaccaggccttcggcttcggccagcagcttcttctgcaccacgccggcttcggcgttgcccagcgattcggtggcggtggcacgggccaggcccatcttctcctcaccctgcgcctgcgcctgcagggtctcggccagcacgcgggcttcgttgctgccctgcttcaggctggcttcggccttggcttcgatcacgcgggcctcggcgatgccgaccttctcgatggccagtgccgaagcttcacgcacctgcgcttcggccaggcccggtgcggcctgctcggcgcgcagcgcgtcggccagcaggcgcttggcttcggcctgcttgccggctgcttcgtgttcggcctgggccagcgtggtcagttccactgcgcgatgcttggaagcggtctcgcgtgcctgcgcttcctttacctcgcgcaccagcgattcctgtgccttggcctcggcttccaggatcagcacctgcttctggcggtcggcctcggagacctcgcgcacttccttgatgcgctcttcctcctgcgccacggtcttgtcgatggagatgcgttcgcgggtgatgttggccacgtccatcttgccctgctcgaccaccttgtcgcgctccacgccctgcagctgcacttcgcggtcggtggtgacctgctcaagctggcgtgcgcgctccacgcgctcggcctcgatggccacggcgcgctggcggttctgctcggccacttccacttcgcgcaggcggttctggtcgcggatctcgatcagctgctgtgcttcgatgcgggcgttctcggacagctggcgctgctcttcctgcaccttggcggtctcggcctcctcgcgcgcgcggatggtctcgatctcgcgcttctggcgtgcttcggcttcggcctgctggcgttccagcgccagcagcgcttcacgcgcttccacgttcttcttggtgatggcgagcttctcgttctgctccagctcgttggtcaccacgttctgcgcggcggtcagctcggtgatcttgcggataccctgcgcgtcaaggatgttgaactggtccagcagcgccttcggggtctgctccaggtaatcgatcgccacgtcttccagcacatagccgttgaggtcgttgccgatcaccgcgatgatctcgtcgcggaactcctggcgcttctcgaacagttcggtgaagtcgaacttcttgccgaccgtcttcaacgcttcggagaacttggcgttgaacagctcatcgacggcatgcttgtccgacgcacggtcggcaccgatggccttggccacgcgcagcacgtcggcctgggtctcgttcacccgcaggtagaaggccacggcgatgtcggcacgcatgttgtcgcggcagatcaggccttccttgccacggcggtcgatctgcagggtgatcaggctgatccgcatcagctcggcgcggtacagcaccgggatgatcagcgcaccggtgaagtgcaccttgggcgtggagctcatgtcgttgacgatcagggccacgccctggtcgaccttgcggtagaaggccttgaacagcccggccacgcccagcagcaggacaagcaggccgccggcgacggccaggaacggtaagagggatgccaacgtcattgatgagtctccttgttgcccggaagcaggttgtcctggaaatcgagggcgatcgcatcggcgcggaccacccggtaatagtgttgttcggccatgtgctcaaccagcacgatgcgctcgccacgctgcagttcgatgtcgctgcggatctgcagcaccagcccggcgccgccatcatcgaccgtggcatgaccgctgcgtgcgtccaccttcggcgacgcgaccacgccggcccggccgagcagcgatgcctgcggcaccggccgcaggcgcagcaggaagcgccggaccgggcgcaggatcagcgcgatgagcggtaccgctggcagcggtgccagcaccgccacgagcgtacctaggccccagcgcagcaggtccggcagcggcagcagtacgaacagatggatgaaataggtgatgagccagccgaacaggctcagcagggtgaccaccaccatgatcgggacgccacccaggccccagcgcgccagcatggccgacaggccactgaggtcggtccccgcctcgagcgcgccatcggcgccgagattgccaaaaccgtcatcgaccaggccgaacgccgcaaccgcccaatacatcaccgacaccaacagcagaatgctgtacggcagcgtcgggtaaccgagtacgacggtgagaaactcctgcatcgcttgccttcctgggctgtgggcggcggccgcccgttcggggcgcgccgcgcgcgtcccgtcgatccccgcgccagccctcatggcaggcgcgcttgggaccatcctatgtgaagaatgcgtgcaggctcaaatccaggtccaaatcacggcaaataatgacgccaatcactcgagaaccgtgcaatcggcgcggcgcacttcctcgacgaaggtgcgcatcttgtagccgtccttgatgcccggctccagttcgatgccactggagacatccacgccccacggcagggtacccagcaccgcgtcgtagacgttttccgggttcaggccgccggccagcaggaacgggcgatgcaggccggtcgggatccggccccagtcaaaggccacgccggtgccgccaccgccacccggcgcgtggctgtcgaacaggaagccggcggcgctgggatagcgcagctgcagggtgcgggcgttgatctcttcacggccgcccatggcgatcgccttcaggtacggcatgttgaagctgcggcagaagctctcgtcttcctcgccgtggaactgcagcagggtcggtcgtaccgtgcgcagcacctcgcgcacttcttccttgctgttgttgcggaacagcgccaccacgtcgaccatgggcgcgatcgcctggcgcatcgcgcgtgcctcggccggagcgacccggcggctgctttcacgggcgaagatgaaacccaccgcgtccacgcccagctcaccggccaggcggacgtcgccggcccgggtcatgccacagaacttgatgcgcgtgcggtagtaggagcggctcatagcgtgacctcggcgggcagatgccagttgtcggggtacaggggcccaaggaacaccaggccctgcggcggtgcggtgggaccggctacggtgcgatcgcgcccggccagcagttcggcgatccattccaccggcttctcgccactgcccaccaggatcagcgatccgacgatattgcggaccatgtgatgaaggaatgcattgccctgcacggcgacctcgatcacctcgccctggcggctgacctgcagtgattgcagttcacgccgtgcatgcagcgcctggcactgcaccgagcggaacgcgctgaagtcgttctcgcctagcagggcctggccggcggcatgcatcaggcccgcgtccagcgcacggcgctcccagctgagggtctgccgctgcagcgccggccgcacttcgcggttgagcaggcgataacggtaacggcgtgcccgcgccgagaagcgggcgtggaaatcatcggccacgggcacgcaccagcgcaccgcgatcgagcgcggcaggcgggtggtggtgcccagcatccaggcgcgcggatcgcgcaccacgtcggtgtcgaaatgcacgacctggcactggccgtgcacgccggcatcggtgcgaccggcacagaccacctgcagcggcgcatcggccaccgacgacagggcctgctcaaggctggcctgcacgctgggaccaccctcgcccaggttctgccagcccctgaaatcgctgccgtcgtactcgacgccaagcgcgtaacgcatgtgctacctcgatgttgcgggaggggcggcgctcaggccggatcgcgttcggaccagaccgccagttcgttgccaccgggctcgacgaactggaagcggctgccaccggggaaagaaaacaccggccgtacgatctcgccgccagcgtcgcgcaccgctgcctcgatgggcgccagctggtcggcatacagcaccagcagtggcgcgccgctgtcactggctcgttgcggctggccgcggaagaagccaccctgcaggcggccatcgtcgaaggcggtgtagtcgctgccatagtcgacgaacgaccacccgaacaccttttcgaagaaggcgcggctgtcggccgggtcactggaggcgaattcaacgtagtcgatacggcgctcgcggctcatggcacggtccttgtcggcgggttcggtcacggcaggcgggccagcagttcgcgagcctgggcctggcagtgcaggtcgccgccctcggccacttccagcagcaacgtccgtgcggtctgcgcatcgcccaggtcgaggtaggcgatggccagttccaggcgttcctgcccggcgcgcggcgcccagccggcatcgctggccggcgcggcagtaccgtcttcatgcgcggccgcggccagcgcgtcgtgcggcgccgcgctcgaatccccgccgtcatgatgctcggccggcaggtcgaacacgccgcggaactgcggctgctgttcggcgtgcagcgcgtagtccggtactgcgatctcgtcagggaccgcctgcgcgggcggctcatcctgcacgggggtgtcctgcatggccaccggctcgtcccagcgcggcaggtcggtcacggccccgggcagctccaccacttcgtcatcgcgcagcgtctgcgcctgccagtcagtctgggcggcgacgtcggcggccgcttcggcagccacgtcatcctgcacctcggcttcggtcgcccaggcaggcatcgccggttcctggcggccactgtcggacaccgccgtcgaccacgaagactgctcggccagcgtatccagcgccgcgccggccggtaccgcagcggccaggccggcggcgtcgccttcctcgcgcagcggcggcagtggcgacggcttgcgacgacgcagcagccaggccgcgccggccgccagcaacagcaccggcagacccagccagtaccacggcgttgccgcatcgcgggcagccggtgcctgcgccaggcgctgctgcgccgcggccaggtcgttgtccttcatcgcgatcagcgactgctgctgttccttgagtttttccaggtcggccacccgctgcttcagctcgccgatctcggcatcgcgggtcgcgatgtcctcgcgtgcctggcgcagttgttcgttgcccagcatgtcaccctcgctgccggctgcagtgccggtggttgtgcccgcgtgcgcggcgtcggaggccagcgccggagcgatttcaagtcgtgccccagtggccgcagccggggaagaagccttcgtggttcccgccgtggcgaccggggcgacagtacccgccggttgcggcacggtgcgcgcctgacgccactgtgcggcatgctcgcgcaccagcgcggcggcctcggcggcatcgaccgccgccagtgcatcgctgccgggcatgcgcagcacggcgccctgcctgagcaggttgacgttgccacggatgaaggcctccgggttggcccgcagcagcgcaatcattgcgcggtcgcggctgacctggttgccgcgggccaccacgctggcgatctgcgacaaggtctgcccacgctggacggtaacgctgccatcggctgccggtgcggcagcgggtgcagccactgcacgcggacgagccggtgcgggtgccggcgtggtggcggtggacggcgcaggcgcgctcacgctctccgcggcggcgggcgccggggcggcctcacgggcgatggtgttggagagcgtacctgcgggtgcaacgatttccggctcggccacggccagtgcgctggacggtgcatcgaccagcgccgagtactcgcgcaccaggcggccctggccccagtccgcctcgatcaggaagctcagcgacggggtctcgaccggcgtctgcgaggtcacccgcaccactgccctgccctgcgcattgcgggtcagttcgaactgcagttcgccgaccagcccggtcggccgctgcaggccgacgcgctcgaaggtgaccggtgaggccaacgcgacacgcaggttctccagctcggacggatcggccgagaccaccgggatttcggccagcaggggctggcccggcttggacaggacacggatgtcgcccaagcccagggcaagcgccgaactgctggccagggccagcagcgcggtggaaagatagaggagggggcgctttgcgcccctggcccgtttattcatggcgacactataaagcgtgcggaccgcggtccgcacccaccgatggagaccttcggtagtgccggccgctggccggcagacacgcacgtgccatcacggcaatgccggccagcggccggcactaccggtgaggcaaccgctgtgatcagcgctgctcggcggcgaccagctcggccagctgcacggcattcagggcggcgcccttgcgcacgttgtccgatacgatccacaggttcaggccgcgcgggtgcgacaggtcctcacggatgcggccgacgtacaccgcgtcggtgcccgaggcgtgggtgaccggggtcgggtagccaccggcctcgtgacggtccaccacttcgatgcccggcgactgctccagcagcgcacgtgcttcggccacggtgaccttgtcgcgggtttcgatcgccaccgactcggaatgaccgtagaacaccggcacgcgcactgcagtcgggttcaccaggatgctgtcgtcgccgaggatcttgcgggtctcccagatcagcttcatttcttccttggtgaagccgttgtcctggaagtcgtcgatgtgcgggatcaggttgaaggcgatctgcaccgggaagcgctgcggatcgatctcctggaagctcagcagctggccggtctgcttgcccagctcctcggtggccgaacgaccaccgccggacaccgactggtaggtggagacgttgatgcgctcgatgccgtacttgcggtgcagcggcgccagcgccaccagcatctgcatggtcgagcagttcggattggcgatgatgccgcgcggacggttggcgacctgttccgggttgacttcggacaccaccagcggcacgtcatcgtcgtaacggaaggccgaggagttgtcgatcaccaccgcacctgcggcggcgaacttcggtgcgtattccttggacacgctgccaccggccgagaacagcgcgatctcgacgccggccggatcgaaggtggccaggtcctggaccgtgaccttctggccgttgaactcgatctcgccaccggccgaacgctcggaggccaggacgctcagggtaccgaccgggaaatcacgctcggccaggatcgacaacatggtctcgccgacggcgccggtggcaccgacgacggcgacgtggaaactgcgctgtgcattgctcatgggggaactctcacgaaaacgggaatggggaaaaacacgcacgacagctgggttcggggaacctcctcaagcggggcgcgcggaggttccctatcgtttcccggtttttttgcccagcgtcacgcgcgcggccatcgccgcgtcagcgttgatcgcgctcggcatccgcgacgggccgccgtccaggccgagcccggcaagcagattatccacggccagctgtaccatcgccgtgcgcgtggccagcgaggcgctgccgatatgcggagtgagcacgacgttgcgcagcgccagcagttccgggcgtaccgttggctcgccttcgtacacatccagacccgccgcagccaggcgaccgttggccagcgcatcggccagcgcgatctcatcgaccaggccaccgcgggcgatattcaccagcgtcgccgacggcttcatcttcgccagtgcggcggcatcgatcagatgatgcgaggccggcgtgtacggcagcaccagcagcaggtggtcggactgtgccagcagcgtatccaggtccacataggtcgcgcccacttccgcctcggtcgccgccggcagctgcgaccggttgtggtacagcaccttcatgccgaaaccgtgcgcgccgcgacgggcgatgccctggccgatgcggcccatgccaaggatgcccagcgtgctgccgtggatatcggcaccgagcatggtctggaacgaccactgctgccactgcccttcgcgcagccagcgctcggactcggtgatgcggcgcgcggtggccatcagcagggcgaaaccgagatcggcggtggtttcggtcaggacgtccggtgtgttgctggccaggatgccggccgcgctgagcgcgtcgacgtccaggttgttgtagcccaccccgacattggcgatcacccgcagctgcgcggcgccggccacctgggccgcgccgatgcgctcgttgagcgtgatgatcgcgccgtcggcgctggccagttgtccggcgatctggtccggggcccaggcggtgacggtgtcggtgctgcgcagctgcacgcgatcgcgcagcggcgcgatggccgcgtcgatcagcggctggctcacccacacggtcggccgcgtgtcagccatcgatctgcccgggaatgcgcggggtgatcgtgccgacatcgccgcactgcgcgcggtggcgcagcgcctggtccatcagcaccatcgctaccatcgcctcggcgatcggggtggcgcggatgccgacgcaggggtcgtggcggccggtggtgaccacctcgaccacgttgccggacgtatccagcgacgggcccggcaggcgcaggctggaggtcggcttcaacgcgatcgaggcgaccaccggctggccggtggaaatgccaccgaggatgccacccgcgtgattgctggcgaagccctgcggggtcagcaggtcgcggtgttcggtgcccttctgcgcggcgctggcgaaaccgtcgccgatctccacgcccttcaccgcgttgatgctcatcagcgcggcagccagttcaccgtcgagtttgccgtagatcggctcaccccagcccggcggcacattgtcggcgaccacgtccacgcgcgcaccgaccgaatctccggacttgcgcagcgcgtccatgtacgcctccagttcgggcacctgtgcagcgtgcggccagaagaacgggttgtcttccaccgccgaccagtcgaaaccggccggggtgatgtcgcccagctgcgacaggtagccacgcacggtgacgccgaagcgctcggccagccacttcttggcgaccacgccagcggccacgcgcatggtggtctcgcgtgccgaggaacggccgccaccgcgcgggtcgcggatgccgtacttgtgccagtagctgtagtcggcatggcccggccggaactgctggccgatgttggcgtaatccttgctgcgctggtcggtgttgcggatcagcagcgcgatcggggtgccggtggtcaggccctcgtacacgccggacaggatctcgacctcgtcggcctcgcgccgcgccgaagtatgccggctcttgccggtggcgcggcgctgcaggtcgtgggcgaattcggccgcgtccagcgccagccccggcgggcagccatcgatcacgcagccgatggccggcccgtgcgactcgccgaacgtggtgacggtgaacagcttgccgaacgaattggagctcacgggcgctgcgccgccagttcggtgatgcgtgcgctgtgggcgatcagctcgcggcattcaaccgcgaagatacccatctggccgaccttgaattcgatccaggcgaaatcgacttccggcagcagcttgaccagatgctgctcggattcgcccacttcacagatcagcaggccgtcctcgctcaggtgcagcggggcatcgcgcaggatcttcagcaccaggtccaggccgtcgtcgccggcacgcaggcccatctccggctcgtaggagtattcctgcggcagggcatcggtctcgtcgttggtgacgtatggcggattggtgacgatcaggtcgtagtggcggccggacaggccgttgaacaggtccgacttgatcagggtgacgttgtgcgcctgcaggcgctccttgttttcttcggccagcgacagtgcatcgtcgctcaggtcgacgccgtccacctgccagttcgggtagtagtggcccatggcgatggcgatgcagcccgaaccggtgcacagatccagtgcacggtacacgtcgcggccggccagccacggctcgaagccgcattcgatcagttcggcgatcggcgagcgcggtaccagggcgcgcttgtcgctcttgaagctcaatcctgcaaaccaggcctcaccggtcaggtaggcggccgggatgcgttcatcgatgcggcgctggaacagctcaagcacgcgcagcttttcggcctgcagcaggcgcgcctggccgtaggccgggccgaggtcgtgcggcaggtgcaggctgtgcagcaccagctgggtggcctcgtccagcgcgttgtcgtagctgtgcccgaaggtcagcccggcttcgttgaaacggctggtgccgtagcggatcagatcgatgatcgtgtggagttcggcggccgtttcagcggtcatggcggtactgcgggcaaagtggcccccgattataggggctggcgcccgtggcggcatccgttgcggcggaaacgattcgggccacagccggtatgatggggcccacttcgcgcgggagcccccatgttcaatcgcaacgccggcatcatcctgctgatcgccctggcggcgggtctcggcctgctggccgcccagcaggtgttcgcgccgaagccgccggccaatgccccggccaccgaagcgatcacgctgtacccgcagccgcgcgaactgcctgacttcaacctggcccagtccgacggcacccgcctgatcccgggcgaactgaagggccactggaccctggtgttcctgggcttcaccttctgcccggacgtctgcccgaccacgctggccgcgctggccggcgcgcagaaccagtgggaagccctgcccgacagcctgcgcccacgggtgctgttcatctcggtcgaccccgaccgcgacagcgccacccggctgggcgagtacgtgcacggcttccacaaggacaccctggccgccaccgctgacgttccctcgctggagcgcttcgccacctcgttgggcttcgtgttccagaaggtgccgggcaagcatttcgacgagaaccccgaggattacaccgtcgagcattcggccagcttggccgtgctcgacccgcagggccgcctcgccggcctggtacgccccccgttcaacgcgccggcgatcgcccgcgacctgcagaagctgaccgagaaaaccgccccatgagcctcaccaccgccctgacgtatgccctgccccaccgcctgctgtcctcgatggcgcgttcgctggcgtactcggacgatccgcgcgtgtcgcgctggctgatcgacacggtcacccgcaagttcaacgtcaacctggacgaagcggccaacccggacccgcgcagctatgcgaccttcaaccagttcttcacccgtgcgctgaagccgggcgcacgcgtggccgatgccgatccgcgcagcctggtgatgccggccgacggccgcatcagccagctcggcaggatcgaggccggccgcattttccaggccaagggccagtcattcaccgctgccgaactgctgggcagtgacgaggacgccaagccatacaacgatggcctctacgccacggtgtacctgtcgccgcgcgattaccaccgcgtgcacatgccgtggaccggcaccctgcgtgagaccgtgcacgtgccggggcgcctgttcagcgttggtccggcggcagtgaacggcgtaccgcgcctgttcgcacgcaacgaacgcctggtctgccatttcgataccagcttcggcccgatggtcagcgtgatggtcggtgcactgctggtgtccggcgtggaaaccgtgtggagcggcgaggagattccgcactacggcgaccgcatcacccgcaaggactaccgcggccagggcatcaggctggagcgtttcgccgagatggcacgcttcaactacggctcgaccgtgatcgtgctgctgccgccgggcgtggccgaattcgccccgcagttgggcgccgaaagcccggtacagctgggccaggccctggcgaagctgcgctgataaaaaagggacgtaaaaaggggacggaggggattaagtcgtttatgcataaacgacttaatcccctccgtccccttttccacaacgggatgccggccagcggccggcactaccggtacgcgcgttactgcagggccggggccgggccgacgtccatgccgtcgtagtcttccacgcccttctccgcggccagcgctgcgaattcctggttgcgacggtccagcgaggcttcgtcgtggatctccacgcgctccacatgcagcacgtggaacggcgcgtcaccctcttccggatcttgttcgaacagttccacgaaggtgtagccctgcgcctgcaggttctctgccagtgcctgcaacggctcagcagtggagtgcacgaagaagtacccccacagcagcgggccgttgatgtcccagtcggtgttttcgcggaggttggcgaacaggttgcgggtgtcttcgagatccatgcgggttccaggggtcgggggaattacttgtcgcagccctgcagcttcagcgtctggccgtggcgcaggctgtaggccggggccttcaggccgttggcgcgggccagggtcggcacgtcgcactggaacttcgccgcgatggcgcccagggtctcgcccttgcccaccttgtggctgcgcaccggcttcgggcgcgcggccggcgccgggcgaggcgtcgccaccgccgccaccggcgtggtcggcacactggtggaggccgcagcgtcggccaccggcaccacgccgcccacggcgacgctgccggtgtagctggccgcggtcgggcgcttgatcgccgcgttcagatcggcggtgatcagggtgcgggccaggtcggcacgcgggccactgacgcagttgcgctggtacagcccggcgatgcgggtggtggcgttgatcagggtgccggccggaatccagccatcggcttcatagcgcgggttgaggttgcgcagcgcgcgcatgtagccatcacgggtgccgtggctgcccaggcagatggtcagttcatagatggtggtggacttggccaggcgcagcgtggccggctgcgcgctgatcttcgggaactccacgccatactgctgcgggtgcaggaagatccaggccgcggcaatcaccatcggcacatagtccttggtctcgcccgggaactggttgtagacactgtcggtccagaagctctggccggcgctctgcttgaacacgcgtgcggcacggccttcgccaccgttgtaggcggccaccgacatttccacgttgttgttcagttcgcgcagacgttcgttgaggtagctggcgctggcctcggcggcgctgcgcgcatcgaagcgcgtgtcgaagccggtgccatccgggccgaggccgaagcgacggccagtggccggcatgaactgcatcaggccggcggcgccggcacgcgaggaggcgtgcacgcggccgttggattccttggccatgatgccgaacagcagcgcctcgggcaggccacgcttctcccactccggccacatcaccgcgcgcaggttctggtagttctcgtagctggtcagcagcgcaggacgcatgtcggtcagccagcgacggatgccggcctgcaccgccgggttgtactcgaccatgctgtcgaaggcgtgccgcttgtcgttcagcagcgcggcagcgcgcgcggcctcgggcacatccgcggtcagcgggccgatgtgatccgggtcggcttccaggcggtcacccccctcgtcggccacgtcatcgctggcagccgcatcggcgtcgtgcttgagcaggcgcttgtagctggccagcagggtgcccatctggcagcccttctgcttcacgcagtcgttgaggacatcttccatgtcctccagcgcggcgtcggcctcgttgctgcccttggggtcggcattggcgaccagcagcagggcgtcgctgtagcgcttttcggcgacggtcatgcgctgctgcagcgcatccaccttcaccttgtcccgggccgaaacccgctgcgcatgggcgtcgggcgccagggaaaccaggccggccagggccagcagcggccaaccgcgggaaatcaggacaggaacgggcattgatggcactgtgtgcgaaacaggcaggcagagtagcggcgccgccaaggtccgggcaagccgaccttcggaccgtcactgccggcggttaacattgggctattcatcacaagggctggaccatggatccgattctgctcggcaaaggcattaccgacgatattgccgtcaccctgctgccgaaactcggcaaccgccacggcctggtggccggcgccaccggtaccggcaagaccgtgaccctgatgacgctggccgagggcttctcgcgactgggcgtgccggtgttcctggccgatgtgaagggcgatgtctccggcctggccgtgcccggcagcggcgccgagaacctgctccagcgtgccgccgagatcggcgtggccgactatgcgccggccgccagccccaccctcttctgggacctgtacggcaagctgggccacccggtgcgcaccaccgtcagcgaaatgggcccgaccctgctggcgcgcatcctcgagttgaacgacacccagtccggcgtgctcgacatcgtgttcaagctggccgacgaccgcggcctgctgctgctggacatggacgacctgcgcgccctgctcggcctcgtcgccgaggagcgcaaggacatctccaccgagtacggcctggtcagcgcgcagtcgatcgccgcgatccagcgttcggtgctgcgcctggcgcaggacggtggcgagcacttcttcggcgaacctgcgctggagctggccgacatcatgcgcgtcaaccacgacggccgcggcatgatcggcatcctcgccgccgaccagctggtactcaagcccaagctgtactccaccttcctgctgtggctgctgtcggagctgttcgagcagctgccggaagtgggcgacctggacaagccgaagctggtcttcatcttcgacgaggcacacctgctgttcgacgatgcgccgccatcgctggtgcagcgcatcgagcaggtggtgcgcctgatccgctccaagggcgtgggcgtgtatttctgctcgcagttccccgacgacgtgccaggcaacatcctcggccagctcggcaaccgcgtgcagcacgcactgcgcgcgttcaccccgcgcgaccagaaggcggtgaagaccgcggccgaaaccttcgtgccgaacccgaagctggacgtggccaaggtactgagccagctcggcactggtgaggccctggtctccacgctgcaggacaagggcgtccctatgccggtgcagcagaccatgatcgcgccgccacgctgccggatggggccgatcaccgaagccgaacgcgcccaggtgcgtgccggcagcccggtcggcagtcgctacgacaccgcgatcaaccgcgaatcggccgccgaactgctggcccagcgtgcacagaagactgtcgaacaggcgcaggcgccggccgcgcgcagccgcgagcaggacgaagcgcaggaaggcggtttcggccaggcgatcaaggatgcgatcttcggcaccaagcgccgccagggcatgatcgagacgatggccaagcagaccacgcgcaccgtcggcaccaagctgggcaaccagatcgtgcgcggcatcctgggtggcatcttcggcggaaagcgttgatctgccacggccggggtcagagccctttccgctggaaagggatctgaccccagggtcggatccccccgccagggagggctccgaccccgctccccgttcgtcatccagaaaagaagtcgtattgcatgtcgcgttggcgtccccccgcagaaaaaagcacggccctgatcaccgcctccgggcatgcccggctgaaggccgaactggatgagctgtggcgcgtgcgccgcccggaggtggtgaaggcactggccgcggccgccgcggaaggtgaccgctccgagaacgctgaatacacctatcgcaagaagcagctgggcgagatcgaccgtcgcgtgcgctacctgaccaagcggctggaatcactgcgcgtggtcgacaccacgccgaccgacccgctggcggtgttcttcggcgcatgggtggaactggagaatgtggacagtggcgagaccagccgctatcgcattgtcgggccggatgagaccgatgccgggctgggctggatcagcatcgattcgccgttggcgcgggcgctgctgaagaagcgactggatgatgaattctcggtggagctgcccggcgggcaattcacctttgcggtgatcggggtggagtacgcgccgttgtagagtcgagtcatgcccgacctcgctgccgttgtagagccgagcccatgctcggctgatgggcaaacgcagccgagcatgggctcggctctacaacggcggcgggtatgtgcgccccgcacgcaacgggcggaaataatcggcattgcgatagaaggcggaatcctgcacgccgtgccagccaggaatacccgccaacggcaggggccgcagctgcagcggatcggtcactgccctgccttcggcaatggccgcagtcaccgcgtcaacgcaggcagcatcggcatcaccctgcaccaccacgcacttgcccaccagcaatcgccccggcagcagtgcctgttccatcaacgcgtgcccgaatacggtggcaatggcgatgtcaccgctctgccagcgcgttggctcgaacaacgcaggccagtcatgcccatcccacgcgcgcagcaacgtgacatcacccacacgcacgatcacgccggtttcgtcgaactgggtcaaggcggcctgcgcgcggttgcgctggccgggtggcatggcttcgatatgccggcactgctgcacgttgagtgcccgcttgagctgcgggtgggaggcccacaccagcgcgttgagcaggtcgtgccagttgtcggcacgggtggcgatgcgcccctgcgcgatgcgggcctcgtagtgcaggccatcggccagcaacgcggcatcctgttcgaccagctgccaacccggcagggacaggcgtgcgtcaagcgccgcgatggacggccagtgggggccatccagcagatcacggaaatcctgcagcccggcaaacagcggctgcgcgaacacctgcggatcgatcgccgcacgtggcggcggtacgaagcgccggacgccgcccccgtcattggcggcggtcgtcgctgcggtcacagcatcttgaggtcgaatgccgggcgggtagcggcgggcagcgcgtcaccgtacaggtcgtgctcgtcgctctcggtgatttccacgtcgacgaattcgcccacgcgcagcggcacctggtcggcgttctggatgtgcaccagtccgtcgatctccggcgcatcggccctggaacgggccacggcgatatcgccttcgatggcgtcgaccaggcactgctgcacggtgccgatcttggcctccaggcgtgcggcggagatctgcgcctgcttctccatgaagcgggccagacgctcctgcttcacttcctccggcacagcatcgggcagatcgttggcggtggccccctcgaccggcgaataggcgaacgcgcccacgcgatccagctgcgcttcgtcgaggaacgacagcagttcttcgaactcggactcggtctcgcccgggaagccgacgatgaaggtcgaacgcacggtgatgtccggcgcgatacggcgccagttctgcacgcgctccagggtcttctcgaccgcaccggggcgcttcatcaggcgcaggatgcgcggactcgcatgctggaacgggatgtccaggtacggcaggatgcggttctcggccatcagcggcaccacttcgtccacgtgcggatacgggtagacgtagtgcatgcgcacccacgcatccagctcggacaggccttcgcacagcgccttcaggcgggtctggtaggccttgttgcgccacatcttctcggcgtatttcacgtccacgccgtaggccgaggtgtcctgcgacaccaccagcagttcgcgcacgccaccacgcaccaggcgctcggcttcgcgcagcacctcatccaccgggcgcgagaccagcttgccgcgcatcgacggaatgatgcagaagctgcacgtgtggttgcagccttcggaaatcttcaggtaggcgtaatggcgcggggtcagcttgatgccgtagtcgggcaccaggtccacgaacggatcgtgcttgggcggcagtgcttcatgcaccgcttccatcacgctctggtaatcctgcgggccggacaccgccagcacgttggggtacgcctcgcggatctgctcagggcgcttgcccaggcagccggtgacgatgaccttgccgttctggttcatcgcctcgccaatggcatccagcgactcggtcaccgccgaatcgatgaagccacaggtgttgaccaccaccacgtcggccgaatcgtaggacgggacgatgtcgtagccttccgagcggagctgggtgaggatgcgctcggaatcgacgagggccttcggacagccaaggctgacgaagccgactttggggttcagctgggacatggaatcgcgggactctgggggcctgggcccctgccggcatggcaggggttcctgggggccggggcctgaaagggcgccagtataccgggcttcgggccagcgccctgaatcgccgctgccgcctgcggcgcctggcacgtgaagggtcagtacccggtcatatccagcaccactgcaaccgcccggtctcagccagcggctgcttcaatgggcagcgcttcttccacctcgatcgcctcgaaccggtacagtgccccgaacttcaaggcatacgcatccagcggcgataccgggatcaccatctgcggaagaaggttctcgccctccggccggaaatgcagattgaccacccccgactgctccactgcgcgggtcagcaggacaagacgtgcgttgaacttcatgttggatctccaaaaaaagggccgcatccaccggcggcccgaacggttttcatgcagggcacccaccgcgacgggcaggtgcactggtcaccacacgcccatgcgcacgcgcaggcgtccggcttcgtcatagacccgccagttgccatcgctgtactcggtacgacgcccgccaccgggggcactgacactgaacgcgtcggccaccacatcgaaacgcgagacctggccgctggacgccagttgcacgccccctacccggccatctgcacggacgttgaccgaccactgcgcggaagactcggtgcctccggccgaccaggtgggcggggcggttgctgccgcgtccacctggctgagcatcgggcggaacatccagaaatagggcgtgtttccaccggtgccgatcacgatcacgcgaaagcgagcgaaggtcgccgtggcgggcgccttggtgatcaggaacgtgcgcgtcaagcggtcgagcgtgatcggggttccggtatcgctcctcacgcccgggctgtgcaccagccccaggtgattgccggccgcatcgaagaacgtcatctccagcttggcttccacgcgatgggtattgatccaggcggacgcgcaataggtcttgccgccttcgatggcgatgtcgtactcggttccccaccatgccatttcgcctgctgcgacgacgccgggcgtcaccgcgcccagcccgaagatcccctgcggatgccagttgtcatcgccggtggggttgcccagttcggtccaccgcccgttcggattactgccccagccccaccccgagcgctgccagaaggggaacgtggtgttcatcagcaggttgccaccggcgcccagattcttgacctgcgcctgcatgctggtgaccacggctgcatccgccttgccacccagtgaggcctgcacgccatcgatccgcccggacagcgcggtcagttgcgtaccctgctggctgacctggctgttcagctgcgagaagccgctggccgatacatcgcccacctgggtcttgagctgggtcaggtcacgcgcggtggtgtccagcttggtgccctgctggcttaccgaggtgctcagccccgtgatggccgaggcattggcatcgttggccacctggtcggtgatgtcatagacctggacgctgtccacccgcacctgaccgttgtcgggatgaacatagaggttcaagcgccaggcatcgatgccgctgttgaaggcatcgaagtcgaacgatcgggtctcgaacgcctccaccgcgaacacggcacgcagatcctggtaggactgctggcctgccgcattcttgcgatacatccgcaccagcagattgttggcgccgccagcaccgcaggcgcggacgatcacccgcaggcggcgcgcgccgttgatcggcacccatttgccaccgttggcctgcagggtcggattcacgttcgtgtagcggttgagcagcacacctgggcgtccgtcgccgttgaccgtactccacaccgccccattggccaccgccgatgccgtccacccccccagcccttcggcgaagtcgggattgggcagcaggccgcttccggtgttgagcacgcccttcagcccgctggacaggtcggtgagctgctgcgcctgcgcgtcgaccttcgtgccctgccgatcgactttggtggtcagcgcggtcaccgcggtggccgtggcagcggcgctctgctgcgcggcgtaggcgtcggtgacatcgatcatgcggatgtcgtccacctgcacgcgcacgcccacttcgcgcgcaccacttcctcccggaatgctgaccagcatccgccacttcgccgcagacgcggcggtgtccaggtaaccgctgaccttggtccagccatccctgcgcagcgaggccagtgcgtaagcctgcaagggccacgaattctccgcgttggcttcgttggtggtctgccagcccacccggatggaaccaccagtcggctggatactgtccggatgcaggcgggcgtagtactccacatagatgcggcgattgccggtgatgggggtccactgcccgaagtacaggtccgcattggtgttcgggctggtgttggccgcaacgttcacgtccagaccgcgctcaccggtccggcgagcatcggcgcggacggtgtagatcgtgcccgccgcactgcccagcagctggccatcctggaacgtttcgaacgcacccagcgggaacaggctgtcgctgccattgaggaccgactgcacgtccgactgcagcttgagcacactggacgcactgctggtgacacgatcgcccagctgcaccacgtcgctgcgcaggttggcgatggccgtcgcgttgccggcgatgtcctgcgcatcggtgatgtcgtagaactcgatccggtcgaacagcaccttgccgccggcgttggtcagatgcacctgcggcatgatctcgttgcgatcctgcgcagcagaccattcggccgtgtaggttttccaggacgcatcggacaggttcagcgtcacgtcggcgtggctttcgcctgtacccgtggttcgcacgcgcaaccggcagaccagggtcgccgtcgcatcgtcgaaggcgcgggcgaccatcaccaggcggtaccgccgcgacctgccggcaacaacgggcagccaccgcgcgtcattggccgtgatggccggattctgcccggcctgcggcccatgcgtcatcagcaacgcatcaccactctggcccgatgccttcacccactccacggtgttggccgacacggtacgggtcagcgtccaccaggcggcactgccagcaaagttactgttgcgcagcacgttgtcgctgctggtcaccgaggtgtcgacccgcgcggccaggctggtcaggctgtcggcggcggacaccaggtcggtaccgagcttgctgacgtcggtgcgcagcccggtcaatgcgtccgcattgctccgcgccgtacgatcgagcatcgacgaatcctgcgatccggtcggcacgccattgagcacggtgacggtcatttccacccacatgccagtacggccggtctccggcaagggcgacaggatctgcctgccaccgccggcaccactcctgcgccgcccgatcatcaccagcatccgcgaccccgacagggccgccaggttttcctgtgacaggcccgcgtccagcaggcggctgcgcaggccactggtgtcgctgttgctggcactactgatcgcccccactgcatcggacgtataggcaatgaagtactggttgtccttcagcgtctggtcgtaccaggtgttgaagcgggccgactcgctctgcagattgccatgggtatcgaacaccgccgtatcggtgatgctgttgtccgcattgatgatgcccacccgcagcccccggttggcgcccatgcccggcacgatgctgccattggcacggtacacacccgatgctcgggggccaccggtgggccaggcgaggatatgtgcgttggcgatgatgttgtaggccaccatgttgccgatgcccgaggccagccgggtgacgtcctcggcggcactgctcagcttgccatcgatctgttccaccctggtcgacaggccactgaccgccgcagcgttcgcgtcgacatcggtcacatcctccacccacagatcgtccagccacaacgtgccggccgtgccattgcgattgatcgtgaccttgatgccctgcaccgtgccggtaggcggcaacgtcacgaaggtctcggtcttgacccagtccgccgatttcgggaacgactgcgtggcgccgcccatcaggttgccgttgtggtcggcgacgcgcagcttggtattgtcggcggtgccgtcgaagtcctcgctggtccgcgtccagcacgacacccgatagcgacggccggcggtcagggtgatgacgcgcccctcattgaccgcggcgctgaccaccgtattgcttccgcccgcatagggctccgccttccagcacaggctgttgccgcggccctcgcgcaccaccgatgctgcggtggtgttgaagaacgtccagccggtgccagcgcccaggttgaagtcgccattgagcgcgaggttgctgcccgcgcccatcaccgcttccatgcgactcttcagctgcaccaggtcctggctgctgctggtaacccggccatcgagctgcccgacttcggtcttcaacgcattgaaggcgctggatccgatcttgtcccccatcgtggcatcgaggctgtccacgcgccgccccagcgcggtgtcagcggtcaccatcgcctgctgcaggctgctgacactggcactggtggccagcgcgccggtgcctgccggcatccgtgcctggagtgcctggatcgactgcgcgttgacctggtcgccactcagccgtgcggtcttctcggccgcgatcaggccctggctgacccctgccaggtcaccgccctcgtagctgccgcgcaactgcacggccagcgactcgcgccggcccgcttcgctgctgtctgctgcgacgcgtgcagtggcttcgtcctgcagcatggccaccgacgcacccggcgtcgggcggccgatcgccacccagtccagcaggaagtagtcggcatcggtctgcgccttggacagatccaggcggatctggtcgacgatggtcccgttccatggaatgttgtccacgtccagcgtcgcgatgccgttgctgtcatagcttggctccgcgaactgcaccatgcgtgcgttgtcccacgactggccgggaccattccacagcaggcgcccgtcccaggcaggactgcccaccttgcggatgcgcagcttgacgaagcggtgcgccgcgccctggacatcctggccgcgcgggctcgtcacgaaggcgtcgctggcatggttggccgggcgcagccagccctccaccagcgtcggactgccgccattcgcgccccaaccttccacgctgctgtcgaagtaccagatgcgcttgctgtcgaactgcacgccactgcctgccgacagctggctcaccatgcgggtcaggttctccacatccgaccggcgctcgctggtttcgcgggtcaccgccgtggtcagctcggtgcgggtattcagatcgccggcagcacggtccagcacttcgcgcgccaggccatcggtgttcgccttgagcgcctgcgcctgctggtccagccgttcggcctggccggcaagtcgttgggcgctggcggtgatctggtcctgcaggcgcagcgattcgctacgcagcgcctcggctgcacgggtggcggcggccaggtcgctgtcgatgcgggcgttgatttccttgcccaggtcctgcttgaccgattcgaccacaccgccgattccctccagcgtctgcccggtattgcgccccagcgagcgtcgcaggtagcgggcaccgacggacagcacgccagcggtgttgcgactgcggcacgcaaacgtccagctgcccgcctctggcaatacagcttcgattgcggaggtgaagaagccaccggcatcgcccagcggggtcatgtgctcccacagcgggttgtcgatactgccggcggtatagcggatttccacgccggcgaaatcagccgactgcacggtgtcgccggagaagccccacacataccggcgcacgccaccgctgagctcttcgatgtcgaacagatcgaccaggaccggcggcgcatcggcacccagcgtggtgtactgggtggacacggcaacgccggcacggccatcggggctgtacggacgaacgaccaccggataggtacccgctccgggaatcgcccagctcgctgatcgcgtggtggtgcgtgccacttcctccagcgcggcattgccgtctggatcggacaggacccgcgtttcgccggtgggtccactgatatcgaagctggcctgcagttcggtatgcacgctgccaccccggctgacctggcgctcgaccaccttcagattgctggccaccggccgggtctgcagcgaggattcattcgacggcggcacatactgcccggtccgcacgtagtgccagaactcgggcccctcctgcaccacctccaccgcggcgcccttcaggtcaccttccgggcggatgccggtcacgcgcacgcgggtacccggcgtctgcttgaagtcgtagatccagatcgtgtcgtgtgcaggattgccgtcgttgtggcccggcagcggtgcatctgccggccacggatcggccagcaccagcctgtcacttggctcagcgcccggaaccacgcgcagtacgcggtagacacgctcgcctggaatacgcaggccgatgaacgcactgcccagcgaaggtgccgggaccgtctcgtccagttgcagcgtggcaacgcctgcagcgtcgacggcggcatcgatcaggcggccaccgaagccccactgggtaaggtcgtgctgcaacgccagcaccgacaaccgcgagtaggccaggtgctcgatgtcggtgctgtagctgatcgacttgtattgatagacgctctgcgccagatgccaacgcgccagcatcgcggcatgggcttcggagctgacgccctcaccggtgatcttggccggattgagcatcacctccacgcccggcgccggcacgcgcagcgtcgccgccttccaggtgcggcggtccaggtagctgtactcgatgccgtcggcagcgttggccagggtgtaatcgacctggaactggcccttcttgatcgtggccatgttgaccacgccggacaggggctgctcatcggccgcccaggccacgcccagccggcccttggcccaggtcacctggccgaagccggccagcgcgatggcgtcgagcactgcctggtggctgcgcacctcggtcagccagtagtcgtagcccagcgcgttgtccgcgcagtgcagcatgaaggctttcaggctttcgatatcgatgcgccggtcggccatgcccaggccggcgatgcgcttgccgttctcatcatggatgccacgcgcgtaggccaggatctgtgcgcccgggttgctggtttcctcggtcacccagccggccgcttcacccttccacaccggaatcggtcgcgcatgagccacgcagcggatctcatccggggtgccattgagctggccggacgccttcatctgcaggccgatggcaggaatgccggcatggctggcgtcgtcgcgctgcacgctgaccagcgtggtccaggtgaaattcgcctgcgcgccactgccatcggtgttctgcccggccacgcgtacgcgcacgtcgtactggcccagctccacgtcgcggccgtagctgacgcggcgcgccttctgcgtgcgtcccacgacgctgtaattgccgaacgactgccaggcatcggagccgaccggccggtactggatctggatctgctcgcggttgtccttgtccttgcccttggacgtggtatcccacagccggaactcgatgttcacctgcaggcgcagagagtcagcggagctggtgcgctccacccacgggctggccacgtgcttggcatcgctgccggtatcgagcagctgcgcgccttcaatcacatcagcgttgctgtacagcggaatcgcttcgtcgggcatctgcgggaagccgcggaaccaggtgcgcacgccttcgtagctggacagcgccgaatcaccgttctgcagggcctccacccggccaacgttgatgcccgggctgagggtcaggccgacgtactgctcatcgccctcgaaccaggtataggggcggctgatcaggtccggagcgaggcgcgtggaaccgaacagcaggcccagcggttcataggcgcgcacacggttgcgcggcgctgccagggaatacgccgtgtcggcgacaccgccaccgccacctgcacggggaggcttcgggcccagcaccttgttgatcagcacgctgccggcaacatagaccgccgacgccagcgcggtgccgtaggtggcgctgagccccgcaacggcgcctgcgccccacgcggaaccggccaccagcgtgccgatgccgaaggtgaaataggtcagcgcgatcatcgccaccagcggaatcaccgccttgcccaccacgctgcgcacttcgatcaactggccatggcgcggtcgcgtgtgcatccactgctcgcgcggcacctccagcccgtcaacgcagacctgccatgcgcggccatcgagcccgtctacatggcgcatgaggaatgcgtacaggctttcacccgggcgcagttcgaccggcacgttgcgctggccatccagcagcaccgggtgcggggtgatgatgaggcggccgtcgaccgccggttgtggtgtcagttccatgcgtagtatccctcgatcctcagcccaaatccgggcaggtcacgaacgcggtgcagcacgctgcagccgttcgtttcgttgctgtgcaagacccagccctcatgagccaggaaaaagaaaaccccggcgtggccggggttgtgttgtccgcgttcgatcatcagtaccaggtcgccgtcctgtggagggccctcgcgaggtaccgcctgcgcgcgcgacaatgcgcccagctcggccgagccgcgccgcccgcgcggccggcgtccgggcagtgccacttcacgggcgaacagcgcccgctgcacctgcatcaccaggtcggcgcagtcgcacgctgcttcgtcataggggatgcccacccatcgctcgacgtcgaccaggcgcatcagaagattcccggcagcgtgaacggattggcatgcagcagcacggcctgctggcgcatcaggaagtcgacaccacactgggcactgaccgtgcgcgtgttgaccgacacctgggtcatcggcaggtcgtactcggcctcgatggcatccggatcggcgcgatcggtcagcatcaaccgtgcggtcaccatctctccgggggcaagcccttccaggtcctcggtgagtgcgcggccgatgttgtcgatcaccagctgcgcgcgcggtgcctgtccactgacatcgtcgggaagctggaagccgaacggtgcggcaatgaactccttgccgttgctggtccagttgacgttgtcgttgacgatccgcaacacctccggcatcgacggcgccgacacttccaacagcatcagcggtccctgggtgtcggccaggcgctggcggcgctcatggaaggaactcatcgcatgtactccagtacaagatcgcgcttggagaagcggaaccgggtgttcagtggcaccaggcggccgatgccctgcgggaagcgggcgctgatcggctgcccggtccgcgggtgctccatcgtgaaccagccgacgcgaccgacatcgtgcaggtaccacgcttcgaatgcctcggcgtcagccgcggtgcggaactgcaccgaggcgtacacgttcttcatcacccggctgttgagcgcgcgcatcttgctggggccgcgctccatctcggtccgctcttccgaagcgacgatctcctcgccgtaatccgcaaagcggatttctgcatattctggccaactgctcatcccactgcctccgtccatccgtatcgggcccgtccaatggcgcccagctcaccaccgttgaggctgtcgcccacgatgtcgatcaccagccgccgtacttcgctgccatcgggcatgcgctgccgctcttcccgggtgttgacccggctttcgccgtagttgttgatttccacattcatcccaccctcgccggcacgggcaatcggtacctgcacataacccccgctatcaccaccggacaggccattgccggttcgcagcgaagtgcgcagggcgaagaatgccgatgggccgccgagcgcagccatgtcttcctggctgagcacgccctcgcccttgtggacgatgccggccggctcgtacttgccccctgggcctgtatagccgccgatggaaaagccggtgatcttcggtccgaacatctgcccgatcgaactgatcagcccactgaccatctgtttggctgccacgcgcgccagatcggcgatgatcgagtcggcgaggtcggagaaggacagctttccggtctgggcaaacttgaccagactgtcttccaacccgcccaatgcattactgaagacgccgtggctcaactcggcggcattggccgcggcatcggcatagtcctcgaacgcccgcattgcgccgttcttccaatcggactggtatgccttcttgttctcctggaactctgcctcgcgttgcagtgactgttcatggaatgcatcgagctcggccagccgggctctgtagcgctccgactcgatgaccttgccgtcctcaccacgcgactcgtcgtccagcgcgcgctttcgattgtcccgatcctcatccagagcggaacggcgttgcatgcgatccacgctcgctgcgccatggccgatgccgaacagcgcctggtcgttgccgcgctgctgtgcatgcgccgcctgctggagttcccgctgcagcttcagcagatcctgctgggccttcttcgacgcttcagcggctgccgcttccttggccagggccaccgcggcgtccagcgaggccttcacccgcagttgcttctgctcgctgagcttcttctcggcatgctccatctcgtcaaggagggtgacctgcagcttttccgcctctgtcatcccctccttcagcttctgccgcacccggtcctgggcgatctgcttctcgatgcgatccatcagcccggcgtacgcatcagcctgctcgtgcacgcccctgaccgactgctgggcggcctgctgctgttcgcggaactgggccttgcgttcgatgtcggccttcttgcgcgcggcatccctgttgaactctgcgcgctgggccgggtccatcttgtccgggccgccccttgcgttgatctccgcgccgcgttcagccatccaggccgcgtactcgccacgggtcagccggatccactcgacctcgtcccgccacgcctctccgcgcatggcgcccagcatgccgttgaaggcatcggtcgccttcaatgcgttccattgcgtcgcacccagagacgcgatgagctggtcaagcgtctggttgtccacgttctggatggccgcggcaatcgcattgaacagcttctcgtcgagggcgcccctgatcgtttctttcaggccccggaacttctcctggaccggcgcgacctccgcctggaacgcttccaggttcgccctggccttctccagctcggcgtagtccgaggctgcactcaggcccgccccttcccgtcccgatcgctggccatgactcactcggccttcccaatggacgaccgagccctgcagcgccttctcgcgtgcctccagctcgcgcagcgccctggcctgctcatgcagcgtggcgaccgcctgctccaggggcagcgtgcccgcgcccatgcccaggccggcctggtccatcgagaacgacatctgctgcagcgactgcatctgctccttgtactcgctgcgcgcacgttcggacgccttgaccatgtccaggtacgcttcgcccagcttctgcaccgacgcgatggcgatgccccatgggccaccggcggccgtcagcaggccgctaccaagctccttcaagccgctgccgagcacatcgccgccgacgttggcctttgcctttgtcgcggccttgcccgttgcgccctccggtgccgcatgcacgcgcgccagcgcggcggccgtccgctcggcctccgcgcgcagtgtcttgagattctgcgttgccaggcggctggcctccgccattgcggtacggaagcccgtcgtgttgacccgcagtactacgtctagattctggttagtggacgccatacgcgttcctccaagaatgatgaggggccccgcagggccccaggttcgattgcatgccacgcatcggagaagcaatgccctgccccgcccggaatcacgccgcagcgttgcgccgcgatgcgctgccgaacagttccagcagctgctgcgagcgctcctttgccgccctctccggcgacgcacgcggtcgcaccagcaggaagtcgtcggcagtggtcgtattgccgtgcacctgcgccagcacactggtcagctgggcgagcatcccctgcaggggctggtccaacggctccaggcgtgcgaacgcatacatctccgagagctggcgggaggtcactcccgccagcaggtggtccggatgcgggaggcccagcctccacgcgatccggaactgaagccggcgctcaggccggcggatcagtttttttccagctctcccacggccgcatcgccgagcgcattgagcgtctgcgcgacacggaacacgcgatccagcgccgcggccgatttcgtgcccagctgggccacctcgtggtcggagaacaggcgctcgcccatttcatcgaccaggcacaggccgacgaatcgcgcgcggaagtcatccaccttgggcgtgtcaccgccataggtctcctgctcccagcgatcacggtcacgcgccgacatcatcgccacgcgcacgctgccgccccattcgggtacggcgacgtcctcgtgccggcgatcctgcgcgtccaggatctgctgcttgcccagcagcatcacggggtgccgccagcggccacggttaccagcgcgaactcacgcggcagcaggtccgcagtgaacgtcagcacctggttggtgcccggggccacgttgaaggcggcgaccttggcgacgaaggtagcggcatcgccggtgggcagcaccatcaggaagtgcaggtcggcatccggatcggcgtcgcgcaggatctcctggcctgccgagctgccgaccggccagcggtggccggacacctgcacggcctggccgccggacagacccgcgatgttctccatctgcttggaacgcaggttggtggcatcaagggtgttggcctggccgcggccgaacgggaaggcggtcaggccgtcgatttcggtatagccggccggattgttcggcgcggtcggggcggtaccggccttcacgtacagcgcggagtcctgggcggaaatggcttgattgatggacatggtgttgaatctcctggaaatgaaaaagccgccttgcggcggctggggttcggggtgatcaggctcggggctgcctgcagtgggtcatcgtggctggcccgtcacagccaccggttgcgcgttgcgatccgcaacacgcggacaacaaaaaagcccccggctcgcgccggaggcttgtatgtcatcgtggctgaaagcttaggctgtgggtgtgcaccggtcaatgcagaaacagccctctgcaccgccttgggaacgcactgccgcaaacccgcagccgcccgatccggcacagccgctgacgccgcgctaaccggcgcagcgccgacaatgcagctctgttcccagcaacgaggaagatgacgatggccgagtggatcaccctggatacgcatcacggcccggtacgggcctggcaggccctgccggaaggcaccgcgcgcggcggcctggtggtggtgcaggaaatcttcggcgccaatccgcacatccgcagcgtggccgagcgcttcgcagccgaaggctatgcggtgctggcgccctcgttcttcgacctggtcgacggccccgacgccgacccggatgcgttgccctacgacgccgagggcgtgaagcagggcctggaacgggtcggcgcgctgggcatggaacgggcgctggaggtcgtgcgcgcggcggccacccggctggcgccctacggcaaggtcggcaccgtcggctactgctggggcggcacggtggcgatgctgtccgcactgcgtctggggctgccgtcggtcagctactacggtgcgcgcaacgtgcagttcctcgacgaggcgcccaaggccccggtgatcttccacttcggcgcccaggaccgcagcatcccgccggaagcggtccaggcccaccgcgagaagctgccgcagatggccacctacgtctatccggccgatcacgccttcaaccgggaggtcggacatgcgtatgatccagacagcgccgccctggcgctgcaacgcaccctggacttcttctcggagcatcttggatgagcgaattcgaactcgattcacgcctggccaccgatagcgtgctggtggcggaaggaccgttgtcgcaagtgcggctgatgaacgacgaacgattcccctggctggtgctggtaccgcgcctggccggggtgaccgagtggatcgagctggacggcgagcagcaggacaagctgcgcaccgagctcaaccgcgcctgcaaggccctgaagggtgccgacggggtggagaagatcaacatcggggcgctgggcaacatcgtgcgccagctgcacttccatgtcatcggccgccatgacggtgatccggcctggccgggcccggtctggggcagtggcccggcgcaccgctacgagccggcggcgctggaccagcatgtcgcctactggaaggaacggctaggatatccggcccagtcctgagccttcgccgacccgatgcgattcaacctcgttgccgccgtcctgctgatcctgatcggcctgttcatgctcgccagcaatctcggctggacgcacctgaacctgtccaagctgctgttgacctggtggccggtggccctggttggtgtcggcatcgcgatgctgttcggtcgcggcaaataaggaaggcggcgcattgcgccgccttccctcatgtagagccgagccatgctcggcttcaatgcagggcagccgagcatggctcggctctacaaatcgcctgcaatcgtcaggtccgcggcagggtcacgccggtctggccctggtacttgccgccacggtcgcggtaggacgtctcgcagacgtcatcggcggccgcctggaagaacagcatctgtgccacgccttcgttggcgtagatgcgcgccggcagcggcgtggtgttgctgaattccagggtgacgtggccttcccattccggctccagcggcgtcacgttgacgatgatgccgcagcgcgcgtaggtgctcttgcccaggcacaccaccagggtatcgcgcgggatgcggaagtactcgacggtacgcgccagcgcgaagctgttcggcgggatgatgcattcgtcggcggtgatgtcgacgaagctgcccgagtcgaagtgcttgggatcgacgatcgtcgagttgatgttggtgaacaccttgaactcgcgcgagcagcgcacgtcgtagccatagctggacgtgccatagctgacgatgcgctggccgttggcctgcttcacctgcccggcctcgaacggctcgatcatgccgtgctgctcggacatgcggcggatccaacggtcactcttgatgctcatgctttgtcctgggggtacgagggggcgcgaggattctagcaggggcccggcctcggccggcggcccctgccccggcccttacagcagcgacgacaggatcgggatcgaagcccgcgggcgcctgcccacttcctcgatcaggcgctgtgcggcatggcggtaggcctgggccggcgccgaatccggctgggcgacggtgatcggcgtgcctgcatcgccctgttcacggatgccgatctgcaggggcagagagcccagcagcggcacgccgtactgcgcggccatgcgctcgccgccgccctcgccgaacaggtgctcgatgtgcccgcaactgctgcaggtgtgcaccgccatgttctcgacgatgcccagcaccggcacctcgaccttctcgaacatcttcagcgctttcttcgcgtccagcgtggcgatgtcctgcggcgtggtgacgatcaccgcaccggccagcggaatcttctgggtcagggtcagctggatgtcaccggtgcccggcggcaggtcgatcagcaggaaatccaggtcgtcccacagggtgtcgttgaacagctgggtcatcgccgaggtggccatcgggccccgccagatcatcggcgtgtcctcttcgatcaggtagccgatcgacatggtgtccacgccaaaggcacgcaacggctcgatgctcttgttgtccgggctttccgggcgaccggacaggcccagcatggccggcacgctcggcccgtagatgtccgcatcgagcacgcccacgcgcgcaccgagctgctgcagcgccacggccaggttcaccgaggtggtggacttgccgacgccgcccttgcccgaaccgaccgcgatcacgttgcggatgcgggcatgcggcgtaagtcccttctggacctggctgacatggggacggcggggagaactgttcacaacgggcaccggcggggtcagggggataacccgacatcatacaagctggatgcaagctgactgaaattcaggaatgcgacagattcgtgcacagattgttaagttcatgttacgttcgatgagcactgttttgagctgcggagccggatattccagcccgcgcgatggcgcatgcgcagtgccgtttttgtttttgctctccaatggaattacatgaaacacgtcagcaataccgcacgtcgcaacacgctcgccgtcgccctgatgtccgctctgatggccgccgccccggcaatggcccaggacaaggcgaccaacctggacaagatcaccgtcaccggttcgctgatcccgcagacccaggtcgaaacccagaccccggtgatgtccatcaccgccgaagacatccagacccgcggcttcagcagcgttgctgaagttctgcagcagtcgtcgctgaccaccggcggcctgcagggtggacagacctcgggtgcgttcacccagggcgccgaagccgccggcatgttcggcctgaacccgggctacaccaagtacctgatcaacggccgcccgatgctctcgtatccggcgctgtacaacggcagcgagtcgttcaacaacatcagcggcattccgatcgacatcgtcgagcgcatcgaggtcctgccgggcggccagtcgtcgctgtacggctcggacgcgatcgccggcgtggtcaacatcatcctgaaggaacgcatggacggcggcacgatgtcgatccgtggcggcacctacaccgaaggtggtggcagcaacatccgcttcagcgccgccaagggcttcaatgcattcgacgaccgcttccacgcgctggtcaacgtgcagatcgaaaacggcagcccgatctggggctaccagcgtgacatcaccaagcagaacaacccggtcggctacaccgcacagctgccgtcgaacgactttgccgtcatcggcaacgccgacaacaagctgtacatgatggacccgacccgctgcgccaacgtcgcaggcctgtacgacggcaccaccaccgtcggcaagcgtgcatcgggcgaatcgtgcggctcggtgtacagcgccggctacaagaccctgaagaacggcaagaacagcggccagttctactcgtcgatgaccttcgacgtgaacgacaacttccagctgttcgccgatgtgctgtacagcaaggagaagaccgagttcacctccggctccagcgccctgtggtggggcaccaagtcggtgatgggcggtttctacgaccagggcctgggcaaggtcgtgaacctgcagcgcgccttcgcaccggaagaaatcggcccgggccactacaacaacatcctgaactccgatgagagccgttcctaccaggtcaccctgggtggcaagggcatggtcggcgactgggactacagcgccagcttcacccgcggcgaataccgcctggaccagaaccgcttcgcgcgctggaaggacaagatcgaaggcttcttcggcgacaccgtgctgggcccgcgcctgggtaccaccgctgatggcttcggcatctacaacccggactacgccgcgttctactcgccgatcaccccggaccagttcgccagcttcaccggctatggcacccaccgcagcaagacctggcagaacctgggtcgcgtgcaggtgaccaacgggtcgctgttctccctgccgggcggcgacgccggcctggccgtggtgctggaaggtggcagcgaaggttgggattactcgcccgaccaggccttcgtcgatggcaacgcctggggcgccaccgccgtggccggtgccggccaccgcagcaactacgcggtgaccagcgaactgcgcatgccggtgttcgagtcgctgaccatcagcgcctcgggccgctacgacgccttcaagatcgccgacaagaccgttgacaaggccacctacagcatcggcctggaataccgcccggttgagagcctgctgctgcgcggcaagtacggcaccgcattccgtgcgccgaccctgtccgatgccttccagggcatgagcggctcgttcgcctccggccagaacgactactaccgctgcagccagatgggctacgcgctgcgtgacgaagcctgctcgttctacaagaccacctcggtgtacagcgaaaagtccggcaacccggacctgaagccgatcaccgccgacgtgtggagcgcgggcgtggtgtgggccccggtgagcaacttctcgctgtcggtcgactactacaactggaagatcaagaacgaggtcaagaccctgagcaccgaccagctgctgctggccgagtaccagtgccgcaacggcctgccgaacaacacctcggccagctgccagaacgtgaccgactgggtgtcccgcgacgccggtggcaacctggcccgcgtgtacaccccgaagctcaacgtggccagccagaacctggaagcggtgaccgtcggcgccaagtaccagcaggacttgggccgcttcggttcgctgatgttctcgggcaactacaccaacatgctgaagcgtgaagtggtgccgctgccgggcgcacagaagctggatctgctgagcgatccgtacaacatgtggtactacgacaacttcgccaaggtgcgcggcgatgtgtcggtgggctgggccatctccaagttcaccaccaccctgtacgccaactacgtcggcagcaccccgaactacctggcctacaccggccgcagctatgactacgtccactcctccggcgccaaggccggcaagtggggctcgtacaccacctacaacatgagcctgaactaccaggcgcaggacgatctgaccctgtcgctgatggtcaacaacgtgttcaacaagctgccggaaggccagcgctacaactacccgggcaacgaatcgaccccgttcaacgacggcttctacagcgtctacggccgtcagatctcggcccaggtcaagtacgacttctgatcccgtcgtattccggactgcgtgtctggaccaggccccgcttcggcggggcctttttttgtccgtcgcacagcacggccacatcccgttcacggttcagacacgtttgacatgaaccgaaacaaatcaatacatatcaatgagatgaaggagaaatgggcgctcctgtcactgcaaggcgcgcccatcacccacagcttcatgactccctcgtgaacgtttgacaggctcggttaatgtcgtgttaatctcgggtcatcggcacgtgaagccggtaccagcgccgggtggcagcacgctgccgaccccgggcaaggggcacacggagacgccgacaaggacctgtcccggtgtacgacgcaatcattcgattcaaggggatttcagatgatcaatcgcaagtcgctcagcaagcatccgctgagcttcgccctcgcctccgccgtgctgctcgctgcggccgccccggcgatcgcacaggacgcctcgggctcgacgcagaccaccgaagaggcatccaagtccaaggccaccaatctggatacggtgaccgtcaccggctcgcgcatcagccgcgacgtgttcaactcggtctcgccggtgcaggtcgtcacccgtgaagaaaccaccctggccggcttcaactcgaccacggcggccctgcagagcaccgcggtcaccgccggtgcggcgcagatcaacaacgcctatggcggctacgtcaccgacggtggcccgggcgccaacaccctgggcctgcgcggcctcggcccgacccgcaccctgatcctgctcaatggccgccgcgtgtcgccggccggtacccgcggctcggtgggctcgaccgacctgaacgtgctgccgaactcgatcgtcgaccgcgtcgaaatcctgaaggacggtgcgtcctcgatctacggctccgacgccgttgccggcgtaatcaacatcatcaccaagaagaaggtcgatggcgtcagcttcgaagcacagcacaacgccaccgatggcggcggcggtgaagagcgccgttactccatcatgttcggtgccaccggcgagcgctcgcacttctccggctcctatgagtactacacccgcaacgagctgaccctggccgaccgcagctgggccggtggctgcccgaccgacatgtaccgcgacatcgacgcgggcgactattggggcagcggcgacttcatcgacccgctgaccggcaagccgaagtgctggtcgctcgatgccggcggcaccacgctgaacaccatcggcaccaacacccgtaccggtgttgcggccccgggcggcgccggcacccgcttcaaccgctggcgcccgaatgcggccatcaccaccggcctggtgggctacgaaggcgtggacctgaacacccgcgacaccttcgatccggccatgcgcaaccagtcgctgatctcgccgaccaagacccacaccctgtacctgcagggtggcttcgacctcaacgcactgggcgatgccgagctgtactacgagttcttgggcaacaagcgcaagtcgacccagaccggctatcgccagctgaccctggactatgccgtgggcagcccgctgatcccggccaacctgcgtgacagcgttgccggtgctccgaccgaccagaccagcggcaagaacctgggcgtgcgtgcgttcatcggtttcggcaacgacaccaacaagcagaacgtcgacttcctgcgcttcaatgccggcctgcgtggccacctgagctcggagtggaactatgacttcaacgtcatgcactcgcgcagcgacgccgactacaccttcgagagcttcctgaccagccgcctgcgccagagcctggacgtggtctccaacggtgccggtggctatgtctgccgggacggttccaacggctgcatcgccgcgccggcgctgaacaccaacaccatcggtggcaagctgccgcaggactggaaggactgggtgttcgtgccggtcaccggcaacacgctgtacaaggaaacgacggtcaacttcaacgtcaacggcccgctgttcgacatgccgtacggttcggccggtggtgcattcggcgtcgagtaccgcaaggcacgcatcgacgacaccccgtcgccgtactcgatcaatgccgacctgtacaacctgaccaacgccactccgacccgcggttcggactcggtgttcgaagcctacggcgaactggaactgccgctgctgtccggcgtcaccgctgccgaggaactgacggtcaacctgtccggccgctacaccgactacaagtcctacggctccgatgagacctacaagatcggcgcgctgtggaccccggtgaagtggctgtcgttccgtgcgtcgtacggcacctcctaccgcgcaccggcgctgttcgaacagttcctgggcggcaccaccggcttcctgagcagcagtgccgacccctgcaacgagtatggtgatcgcaacccgagctcgccgcgttaccagaactgcgcatcgctgggcctggcaccggactacctggccacccagggcgtgaccgtggtcacccagggtggtgccgaggccggcctggaagccgaaacctccaaggccaagaccctgggcgtggtgatccagccggaattcggcagcggcttcggtgacctgtccttcgccgccgactacttcgacatcgaagtgaagaacggcgtcgacagcgcgggcggcgcgaacatcctgtcgcgctgctacgacagcggcagtgccgacttctcctccggttcgggtctgtgccgcctggtggcccgcaacccggtcaacaaccaactggtggtgaccaacggcttcatcaacctgtccaccgacaaggtccgtggcctggacttcaccacccgctatgtccgcgaaatcggcccgggcaccctgcgcaccacgctgcagttcacccactacctggaacaggccagcaaggtcttctccgacgatccgctggtggactacaacggcatgctgtcgcgtccggaaaacaccgcctcgctggacctgagctacaagtggaagaactggcaggtgcgttacggcctggactggatcgacaagatggacagctacgcgtactacgaggagcgcaacccgggtgacttcgatccggccacctcggcgtacaagctgtacaccccgaactacttcctgcaggccatctcggtgaagtatgaagcggacaagtggtcggtcaccggtggcgtgcgcaacttcgccgaccgcaagccgccgaccatctcccagggtgtctacagcaccgtcggcaacgcgctgctgtacagcggcttcgactacttcggtcgcagctacttcctgaacatcacgcgttcgttctgatcctgctccctgcaaccgccgcccttcggggcggcggttccatttcaggcaccggattctccgcaggccggtgccaacgcattccgaggttgcaatgaagcgagccctgctgctggcggccctggccagcctttcaccgttgctgcacgccaagcctgtggcgcccaccatcgaacagatggccgccttcccggccatctccagcctgtcgttgtcaccagacggaaaacacatcgccggccttcgcgccgatggcgaggagcgcgtgatcgtggtttggcggaccgatgcactggacaagccacccacggtgatcggcgccaaccgcatgaagttccagagcgtgtcgttcatcaagaacggacagctggccgtcgtgctgtggcaaccctacgacctgcgcgccgaccgggtgaccaagaccttcgtcagcaagttcttcatcaccgacatcgaaggcaagcagtggaaggagccgatcacgccgccgcgcgcctccagtcgcaatgaagagctcgagcaggcactggccaacgccacggtgctcgacaccctgcccaacgatcccgaccacatcctggtggtcaacggttcgggcagcagttccggtgacgtctacaaggtcgacctgcgcaacttcacctcccagcgcatccagaagaccgaagagcgcgtggcgggctatatcaccgacctggacagtgaactgcgggcacgcctgcggcaggacgtcgacggtaccggcgcctacgtcgccaccgagttccgctcgcctgccaacggtgcctgggaggagcatttccgctcctacgtgaagaaccgcgacgtcaaccaggtgatcggctttgccgatgatccgaacatcgcgttcgtactcagcaatgtcggccgcgacaaatcaatcgtctacgagtacgacatcacggcccgcaagcagaaggaagtgctgttcgagcacaaactgttcaacgccggctcgatgctgatcaaccgccaccggagcggtgcggtacccttcggcgagatcatgggaatcggctacgccggtccgcgcggcgacgacatccagtggacctctccgcgcatgaaggccctggaccaggggctgcgccaggcgcttggcatccgccaggagccgctggcgatggtcgataccgcgaacggccagcgctacaccgccaactacgatacaggcctgagctaccgcatcgtcgactacaccgccgatctttccaatgtgctggtggctacctccggcccttccaacccgcccgagtatcacctgctgcacgacggcaagctgaccctgctggccaagacctatccgcagatccagccagccgcgctgggcaccacccggctggtctactacaaggcacgcgacgggctggacattccggcattcctgaccacgcccagcaccgagctgtgcggtgccggcccgtggaaagccgtggtgcatccgcacggcggcccgtgggcacgcgatggcatggacttcgacggctcgatgtgggtaccgctgatggcatcacgctgcatggcggtcctgcgcccgcagttccgcggctcggccgactggggccgcaagctgtggatggccggtgatgccgaatggggccagaagatgcaggacgacaaggacgatggcgcgcagtggatgatcgaccagaagatcgcccagcccggccacatcgccatgttcggcttctcctatggcggctactccgcgttcgcggcttcggtgcgtcccaatggcctgtacaagtgcgccatcgccggtgccggcgtttcggacatcaagaagatctggtcgcgcttctataccaaccccttcttccgccaggcccaggcgccgaccgtggccggcctcaacccggtcgacaaggccggtgaaatgaagattccattgatggtctaccacggtgaccgcgaccgcacggtgccgatcgagcagtcggagtggttcgtgaacaaggccaggggttcggggcagccggtcgagttccacgccatcgccgactacgcgcatggtcccgcctggacccgcgcgatcatgggtgaccagctcaggctgatcgacgactacctgggcaagggctgcggcggcggcggcctgtaagccgcaccgcttcctgcgagggcgcccacggggcgcccttgcacgttctggcccttgcgcccggacatgaccttcgacacccttgcagcccaggccggcggcgtatcgttcggcccacggccgtacctgcggcttctccctgactcactcggcctggaggccaagaatagtgatgacgcgcactcccaagatcgtcctgctcagcctggccgtgtcggccgtgctggccggctgcggcaagaacgaaaccccggccaaggatgccgcgacccccgccccggccaccgccgaagccaccacctacaagctggacgacagcaagctgccggcctacaacgccttccagccgagcgacctggacaccaccaaggacgcgtgcaccgccttcggcgactacgtcaacagcaagtggctggccgccaatgaaatcccgggcgaccgcaccagctggggcgcgttcaccatcctcgacgagcgttcggtggccgtgcagcaccagctggccgaacaggttgcgcaggtcaagaacccgaaccacatcgagaagatcgtcggcgacctgtgggccaccggcatggacgaagccaagatcaacgcccagggcatcgagccgctgaaggccgacctggctgcgatcgacggcctgcaggacaaggcggccatcgccaactacctgcgcaccagcgccgccaagggtgacaacctcctgttcggcttcggcgctgaagccgacttcaagaactccggcgtgaacatggcctatgccagccagggcggcctgggcctgccggataccacttactacaccgatgccaagaacgccgacaagctgaaggcctatcaggcgcatgtcgccaaggtgctggagctgtccggcgtggccgcggccgatgcagccaagcaggccgaggacgtggtcaagttcgaaacccgcctggccaaggcctccaagtcgcgcgtggagctgtcgcgcaacgtcgagctgtactacaacccggtcaccctggccgacgccgacaagctgaccccgaacttcagctggaccgagttcttcaagtcgcagggcgtggccgcgccggagaagttctcgctggccatgccggccttccatgaggaagtgagcaagtcgctggccgacaccgatccgtcggtgtggcgcgcctacctgcgcttccacaccgtggacagcgcctcgccgtacctggccgatgccttcgtgcaggagaactacgagttctacggcaagaccctcaacggccagaaggagcagaagccgcgctggaagcgtgtgctgggcaccatcgaaaacgatgccggtgaagccttcggccagctgtacgtgaaggttgccttctcgccggaagccaaggcgaagatggaagaactggtgaagaacctggccgcctcgctgaaggaccgcatccagggcctgagctggatgagcgaggaaaccaaggccaaggccatcgccaagtgggaaaccttcaccccgaagatcggttacccggacaagtggcgcgactggtcgggcctgcagacccagcgcgacagctacctgggcaacgtgcgcgcggccaacgagttcaactacaagttcaacctgtccaagatcggcaagccggtggacaagaccgagtggggcatgaccccgcagaccgtcaacgcctactacaacccgctgcagaacgagatcgtgttcccggccgccatcctgcagccgccgttcttcgatccgaaggccgacgacgcgctgaactacggcggcatcggtgcggtgatcggccatgagatgacccacggttacgacgaccagggcgcacgcttcgggccgaccggcaacatggaagactggtggaccccggccgacaagaagaacttcgaaggcctcaccggcaagctggtcaagcagttcgaccagtacaaggtcgacggccaggcagtgaacggccacctgaccctgggcgagaacatcgccgacctgggcggcctggccaccgcctacgacgccctgcagaaggcgaccgccggcaaggaagatgcgaaggtcgacggcttcacccgcgaccagcgcttcttcttcaactgggccaccgtgtggcgcaccaagtacaccccggaaaacgccaaggtccgcctggccaccgacccgcacgccccggcgcagttccgtgccatgggtgcgccgtcgaacctgccgaccttcgctgccgcgttccagtgcaaggccggttcgccgatggcccgcaccggcgagcagcaggtggtgatctggtaagccacggctgacgctgcggcagacctgcaaaggcccgggaatcccgggcctttgtttttcacagcgcccgtcatccacgaatggcccaggccgttggtagatgccgaccctggtcggcgcacggcccagcggcgccaccgtgacgcgtgcatgccgcgcccatgcacggcttgctatagtgcgcgcgccctcaatccatcacggattcgttccacatgcccaatttccgtccgcttgccatcgccctgggcatcagcctggcgacgctggtcccgacccacgatgcgttcgccgccaagaagaaggccgcgcgcgccccggccgtcagcgcccagtgcagcgacttctacgatgccaccaacgcaggctggctgaaggccaacccggtgccgcagaccggtgccaccaccgcgctcggccagctggtcgagcgcagccgccagcagcagcgtgaactgctcgacgccgcgatgaagtcgccgcagggcaacgtgcagaagctgctgggcgacttctgggccagcggcctggacgaagccgccgtggaagcggacggctccaacccgatcgcgccgctgctgacccgcatcaacgccatcaagaaggccaaggatgtgccggcctcgatcgccgcactgcaccaggtgggcatcccggtggccttcaacttcggcccggacgtcgacctgaaggcactggaccgccacatcggttacttcatgcagggcggcatgggcctgccggacccggcgttctatacccgcaccgacgccgataccgtggcgctgatggggcgctaccgcaactacgtcaagcagatcctggcgctgaccggcaccccggcggccaggctcgatgccgaatcgcaggcggtgatcgcgctggagaccgagctggcgcgcaatgcgcagtcgctggccggcatcaacaacccgttcaacaactacgcgccgatctccaccaaggagctcaacagccgttaccgcaacctgcagctggacgcgttcctgaaggcacagggcgtggacgacgacctggtctcgctggccgacccgggcctgttcaagcagctcgatggcatggtcaccaagctcaagtcggaccagtggaaggcctacctgcgctggcgcgtgggcgactcgatggcaccgtacctgtccaaggcctaccgcgacgcggagtttgaattccgtggccgcgtgctgcgtggcgaaacgctgccgccgcagcgctgggaagacgtgctggaggcgatcaacgtggccgccggcccgatggtcggccgcgaatatgcggcccgttacctgtcggccgaagaccgtcgccaggcggcgtggatcgtcgacaagctgcgcgaagtgcagatcgaggcggtcaagaacaacagctggatgagcgccgaagccaagaccgaagcgcaggccaagctggctgcgctgaagatcgagatcggcaccccgttgcgcgacctcgactacagcgtgcagccgatgggccgcggttcgttcggcggcaacatgctgatcgcgtcgacctggcgccaccgcgaggaaatgaagcgcatcggcaagggcaacgccgaccgccgctgggacgtgctgccgcagcagccgtcgctggcctacgacctggcacagaaccgcctgatcgttaccgcggcgatcctgcagggcccggtgttcaatgccaaggccgacgccgccgacaagttcggcagcttcggtggcctggtcggccatgagctgacccgtgcgatcgacgccaagggtgcactggtcgacgccaagggcgaactgcgcagctggtggaccccggccgacaagaccgcctggaccctgcttggcaaccgcgtggccgcgcagtacagcgcctacgatttcccgggcgtgaagggtgccaaggtcaacggcacgctcacccaggaagagaacctggccgacatcgccggtctggaactggcctgggcggcctataccgcgcaggagccgaaggccaagccggcacagcagcagggcttcttccgcgcctggtcggcgttgtgggcacagcagctgtcgccgaacgaggccgtgcgccgcctgaccgccgacatccgcgcgccgggcctgtggcgcagcaacggcacgctggccaacctgccggcattcggtgccaccttcagctgcaaggccggccagccgatgcagcgcagcgaagccgaccagatcaaggtctggcgctgagccacgcgcactacccgtagtacagggggcgccttcgggcgcccttttttgcgggtgcagcacgatcccgggttaacaccgcgcgtgctatcgctgcggcttcgtccatcgcggagccccgacatggcacacaagaacacgatctgcctctggtacgacaacggcgcgctcgaggccgccaccttctacgccagcatcctgcccgacagcgcggtgatcgccgtgcatcacgcccccggcgactttccggatggcaaggaaggcaacgtgctgacggtcgagttcacggtctgcggcattccctgcgtcggcctcaacggcggcaccgcgttcaagcacagcgaagcgttttccttccagatccagaccgaggaccaagccgagaccgaccgcctgtgggatgcgatcgtcggcaacggtggacaggagagccaatgcggctggtgcaaggatcgctggggcatctcctggcagatcagcccgcgcatgttgatcgaagccgtgaccagcaaggacaaggcattggccaagcgcgccttcaacgcgatgatgccgatgaagaagatcgacatcgccaccatcgaagcggcaatcaaaaaaggggacggaggggattaagtcgtttctccccatgccccgtgtgcaaatgcagattgcgacttaatcccctccgtcccctttttgcgaggtgttgatgtcctgggatgcgatcgtcgttggtggcggccacaacggcctggtctgcgcggcctatctggcgcgcgctggaaagaaggtgctggtgctggaacgtcgtggcgttctcggcggtgctgcagtcaccgaggaattccatcccggcttccgcaactcggtggcgtcgtacacggtgtccctgctgcagcccaaggtgatcgacgacctgcaactgcatgcgcatgggctgcgcatcatcaatcgcccggtcaacaacttcctgccgatggaggatggtcgttatctgctgtcggcaccgggccgcacccaggcagaggtcgcgaagttctccgagcgggatgcgcagcggctacccgaatacgaagcgcgcctggagatcttcgccgatgtgctgcgcgcgtgggccctgcgcgcgccaccggatgccggcgttgccggtggttggcgcgcgttgcctgcgctgtggcagatgggccgtcttggtcgtgaactggccacgctggatgcctcgctgcggcaggagctgctggacctgttcacgctgtcggcagccgagtatctggatcgctggttcgaaagcgaaccgatcaaggcgctgttcggcttcgatggcatcgtcggcaactacgcaagcccctatacaccgggcagtgcctacgtactgctgcaccacgtattcggccagtgcaatggcgtgaagggtgcgtggggccatgcgatcggcggcatgggcgcgatcagccaggcgattgcagcctcggcacgcgaggccggagcggaactgcgcgtggaggccggcgtgcagcgcgtgcgaatcgaacagggccgcgcggtgggcgtcgaactggccaacggcgagatcctgcgcgcacgcacggtggttgccaacgtcaatccgaaactgctgtacgaacaattgctggagccggcacaggtacccaacgcgacacgcgaacgcatggcgaactggcgctgcggttccggcacgttccggatgaacgtggcgctgtcgcggctgccggagttccgcgccctgcccgggcccggcgatcacctcagcgccggcatcatcatggcacccagcctggattacatggaccgcgcctggctggatgcgcgccgcgacggttgggcgcgcgaaccgatcgtggaaatgctgattccgagcacgctggacgattcgctggcgccgcccgggcagcacgtggccagcctgttctgccagcatgtggcgccggtgttgcctgaaggccggcattgggacgatcaccgggagaccgtggccgacctgatgatcgccaccgtcgaacggcatgcgcccggcttcaccgccagcgtgctcggtcggcaggtgctgtcgccgctggatctggaacgcaccttcggcctggtcggcggcgacatcttccacggcgcactgagcgccaaccagctgttctcggcacggccgatggtcggccaggccggctatcgtggtgccctgcccgggctgtacctgtgcggttcgggcacacaccccggcggtggcgtcaccggtgcaccggggcacaacgcggcgcaggtggtgttgcaggatctgtagaggcgtgcccaccaacggtcggcacctgcagcgtcaaatgatccttcggatcatttgacgctgcgcagatggttcgggcgcttcggtgggccgggcgggcggcgcttgaacggcggctgcccgcgccagtagcggatcagcaaccagccgaacagcatgccgccgaggtgcgcgaagtgggccacgcccggctgccagccggtcatgcccagcaccagctcgcccacaccgaacaggatcacgaaagtgcgcgccttcatcgggatcggcgggaacagcagcatcacccgctggttcgggaacagcatgccgtaggccagcagcaggccgaacacgccgccggaggcgcccagcaccgtggcagggttttccagcagcgtacccaccagcagctggcagacaccggcaccggccacgcacaccaggtagtacagcaggaagcgcttctcgccccaggtctgctccagcggcgcgccgaacatgaagaccgccagcatgttgaagaacagatggccgaagctgccatgcaggaaaccgtaggtcagcagctgccaaggctggaagttgccacccggcgagaacgcgtcgaagccctgctgcaacggttgcagcatgaacggctcgaaggtctgcatgccgagcaggaacggctgctgcagcaggaacaggatcgcgttggcgatcagcagggccttggtgacggttggcagtcgcgggaacatgggagcaccggcatggaacggcctccatcatagccgcagcatcgtgtcttgttggcgacccgcaggtccggcctgttcagtcgccagcggtgctcagcccgggccccacaccgctgcgtccagcgccgccgccggatcggtcgccggcatccgcacccggccgttctccacccgcacaccctcggcgcgcaaccgttgtgactgctcgcgccagccggccgacccttcttccatggcaatgcgcccgtccgagcgcagcacgcggtgccagggcaggtccgggtcgtcgttctggcccaggatgcgtgcggtcaggcgtgcacgcccaggcaggcccgcgcgcatcgccacctggccgtagcccatcacctgccccgccgggattgcgcggatcaccgccaggatgcgcgcacgcgcctgctccggcgtcagcgccgcaggcgggtcaccagcagaacgccgatcagcaccagcacggtgccggcgatctgcgccggccccatcggttcgtcgagcagccataggctcatcacgatggtggaaacagggcccagcataccgacctgcgcggccagcgacgaacccacgcgctgcaccgccagcatgatcgccagcaccggcagcaccgtgcacacggtggcattgaccaacgacagccactgcaccggcgccggtgcctgccacagcagcggcagcggatgggtcaccgcgaaatgcagcagcaccagcacgctggccacgcagctggcataggcggtcagccgcaccgcaccgatgcgcgcgaccacctgcccactgccgaacaggtacagcgcatagctgagggcactgcccagcaccagcaggctgccgacgatgatctgcccaccctcgcgctgcagatcgtggccgaaggccagcagcacgccgaggtagctcagcaccagcgcaccgatctgccagcggcccggccgctggcgcgccagcagcacgttgatcagcagtaccaaggtcgggttcaagtacaggatcagccgctccagggtcacgctgatgtactgcagtccctggaagtcgagcaggctggacaggtagtagccggtgaagcccagccacagcacgcgggcacggtcggcccaggacaacggctcggcccggcgcgcggcccacgctgccatcaacgcgaacaggggcagcgccatcagcatgcgcagggcgagcagcgtggtggcatcgacgccgtggcgcaggccgagcttgacgatgatcgccttgcccgacgcggcgatggcgccgatcgcggccaggccgatgccgcccagcgcaatgcgtggggaagcagtggcgatgcgggaagcgggagtggacatcaggacgacggcgggccgcgcagagcggcccggtaaggcgtgggggacgctcattgtcgcatgggggcgcccgctgccctgtagagccgagcctgcgctcggcgtcgccaggccggggcgaaaggctgccgagcagggctcggccccacaacatcccggctcagcgcatcagcaccacttcttcggccgaggtcgggtggatcgccacggtgtcgtcgaactgggccttggtcgcgcccatcttcaccgccaccgcaaagccctgcaggatctcgtcggccgcttcgcccagcaggtggatgcctaccacgcgttcttccggaccggcacagaccatcttgaacaggctgcgctgggtaccattggccagcgcctgcagcatcgggcggaagcggctgtggtagacgctcacctggtcgaaacgccggcgcgcttcttcctcgctcatgcccaccgcgcccagcggcggatgcgagaacaccacgctggccacgttctcgtaatccattttggactgcgggcgccccccgaacaggcggtccatcagccgccgcgaagcggccaccgccaccggggtcaggccgaccttgccagcgatgtcaccgaccgcgtgcacgctcggcacgcgggtggtctgccactcgtccacctgcacctgctcgtgctcgccgatgtcgatgccgagcgcttccagacccaggccacggctgttgccgcggcggccggcagcgaagaacaccgcatcgaacacactgtcgatcgggccgtcatggccgaacgcccgcacgcgctcgccatcgcgctgcagttcgcgcaggcgatagtcgaaatggatccgcacgccctgctgtttcaggttctcggccagctgatcggtcagctcgtaatcgaagcgctccagcaggcgcttgccgcgcaccagcaggctcacgcggctgccgagcgcctgcagcaggccagccagctccaccgcgatgtaaccaccaccgatgatcgccacctcggccggcgccgcacgcaggtcgaagaaatcgtcggagaccaggcccagctccgcgccgggaatatccggacgcagtggatgcgcgccagtggcgatcaggatgtgttcggcgctgtagtgcacgccatcactgcaggccacggtgtgcgcatcaagcagatggccacgtgccggaatgcgcaccacgccggtttcgtccaggcgcttgtggtagctggtgtggatgttgctgatgtaggcctggcgatggatcaccagttccttccacgacagcgccgggcgtgcctcgacatcgaagcccatcgcattggccaggccgatgcgctcgtgcaggtcggccgccagccacatcgccttcttcggcacgcagccgacattgacacaggttccgcccagttcgccgggttccagcattgccacgcgcttgccatgctgcgcggcgcggatcgcaccggccaggccggcggagccgccgccaaggacgatcaggtcgtaatcataggatgcagtgctcatcggaatcgctcgggtcggtaaggggcaggatcgatcgctggcgtgtggccgcagacgagatcggcgatccgctggccgatgccggcgctcatgctgacgccgagcatgccatgccccgctgcaggccagacgtgaggatgcgcgggcgcgcggccgatcagcacagcgcgtgcgcgctcatcgctcacccctgcttcgtcctgcgccgcatcggtggccactgccggtaggtcattgcacgccacagccattccatcggaccaaagcggaagcgcgccagccacgcgtgcgaaacagccacctgcacggcaaacaacagcagcgcgaacagcagctgcacgctgcgcggcatcatctcgaacctgcccaggccgtagtggtagaaggtccaggtacacagcagcgactggccaagatagtgggtcaacgccatgcgccccaccggcgccagccacgccagccgcgtgcgccagtgcacgatccacgccaggtagcccaggcacatcggcagcccgccaaccgtgaccagggccatcgccgcggtcaccggcaggttgtaggcgccgggtgcaaggtagggtttccaggcaacccccagcagcgtgaccagcagccccagcggcagtgcgatccagcgcagcgacgcgtacagccgcgggaagcgctccggcgtcgccagcgcgccactgccggcgaaccagctgccgagcaggaacatgcccagcacttccgggccgctgatcagcaacgcgcccatcgaggtgccgaactcgctcaggcgctgcacagtggcctgcgcccagctgccctgcccgtacacctgccgctgcaggtcgatgctctgctgcgcctcggcaagcatgccctgcacctcttcggccgaagccatcgacaccatcgcacccaccagcagcatcatcgctacaccgccgaggtagacgatcacgcccatccacggcagccagctgcgcggcgcctcgcggcaggccagcaagggcaacgagaccagcgcatacatcaccaggatgtcgccggaccagaccagcagtgcatggcacaggccgatcagcagcaggccggcgctgcggcgcaggtagaacggggtgaagtcgcgcccggccacctcggcgcgttgtgccatcaccgcaaagccggcaccgaacagcagcgagaacagggtgaagaacttgccctgcacgaacacatagacgaaggcgtcggcccagtaatcgatgccccgccagtgcacgtcaatgccggtgaaggccaggtccagcgggccgctgaaagcctcgatgttcatcagcaggatgcccagcagcgcagcaccacgcagcacgtccagcacggcgatgcgttcgccggaagccaccggctgcagggaaggagaagcggcgttcacggggcgtccgtcaggcaggtccgccattatgccgccggcccgtgcaccatggatggccgcggcgtgttccagaaacgcaacggcccgccgaagcgggccattgctgccatcacgatcgcgctgcgatcagtgctggtgaccgccgtcgccgtggacgtggccgtggtccagctcttccttgccggcttcgcgcacgtcgacgatttcgacgtcgaagtgcaggtccttgccagccatcggatggttcaggtcaacgtcgacgacgctcatgccgaccttctgcacggtcaccgcacgcgggccgaagttggtctgcagcacgacctgctggcccggcgccagcttggtattgccgaagtgcttcttcggcacgcgctgggacaggccctcacgacgctcgccgtaggcatcggccgccttgacgtcgacgttgaaggtcgcgccggcttccttgtccatcatggcgttttccaggcccgggatgatgttgccgtgaccgatcaggatcgccagcggctcgccgcggtccttggacgattcgatcggctcctggccgacttcggaaacggtgtagtggaagcggacaacgcggtctttttcgatcttcatgcgcaactctgtctggatctgccggaggcaggcgggttggggcgggttgtcgcccggcggggacgccgccatcatgacggccaatccaaggtggcgcattatccggagatcatgcacatcacgccagtttcgtccggccagcgccggtttctcgccccggccctgctgctggccctgcccctgttgatgaccgcctgtggcggtggcaaggccacccgcccggccccgcccccgcccacggcgaactggccaaagaccgtgccggacaaccccgaggctgccaactcggtgctgatgcgcgccatcagcctggtcggcacgccctaccgctatggcggcaacaccccggattcgggcttcgactgcagcggcctggtcgcttatgtctatcgcgagatgctggacctgcggctgccgcgcacctcccgcgacctggcggcggtgcagggcccgaagatcgacccgcagcgcctggccaccggcgacctggtgttcttcggcagccgcggcagcgtcacccacgtcggtatttatgtaggtgaagggcgtttcgtgcatgcgccgagcaccggcggcaccgtgcgcctggactcgctcagcggtccctactggaaggaccactacacaggggcgaaacgcgtccttcgctaaaatgaacaggcgatatattcaaaactgtgacggacatcactgcgcaactaacgaattactaacggaatttttaacttatccgcgcttttacagggcatgatgccccatcgtttttttcctgtgaccgacgcgtgacgactgacgacctgaaaagcgaaggccagacttccgtatcttcacgtagtgcccgcccgctgttgcttggcctggcactgtgtctgaccagccttccggcctggtcgcagactgctccgaaccgttccgatgtgaccctggccccggtggccgagagcaccgcccgaccggccgccaaggccgaggctgccgctccgcagcgcagccgcgtcgatgccgccgccagtgccacgctggccgccctgctgccgcacctggccgccaacgacaccattccgctgatggaccgctcggccgtggtggccggcgacctcagccgcctgctcgccaactacgacaccagcagcgccgccaatggcagcgtcgtcggcaccgccgccgacaacggcaaggtgcagtcgctgctgcgccgcgcgatgaccctgctgggcaccccgtaccgttggggtggcagcaacccggacagcggtttcgactgcagcggcctggtcggttatgtgttccgttcggccctgggcatcgaacttccgcgcgtctcgcgcgagatggcccacgatgacaatgccgaactgatcaacgaccgcaccgcgctggccgcgggtgatctggtgttcttcggccgcaagggccgcgtcgaccacgtcggcatctacgtcggcgatggccgtttcctgcatgcgccgagctcgggcaaggacgtccgcgtggacaccctgctcagtggctactggggcaacaagttcatgcaggcccgccgggtcgacctctgaccggctggcgtcacagcgccgcctgatacgcaaagcaaagccgctgccctgcagcggcttttttgttgggcccgcgtaatggtgggtagctgccgaccttggtcggcaccgcctccatccacgcatggcgtggatctaccacggtcggcagcgcgtcagccatctcccaaacgaaaggcccgccggtcagggcgggcctttcatctccacgcaacctcagctgcgtggcggtgtcgggtcaggatcgtccacgcccacattgctggacggattgtcatacaccgcctggtccagcagcccggtttccttggccacgatcaccggcaccagcatctggccggtcacattcgtcatcgtgcgcatcatgtcgaggatgcggtcgatggcatacagatagccgatggtctccagcggcaggttggctgcgctcagcaccaccgtggccatgatcaccgcggtacccggcacgccggccgtaccgaagctgcccagcaccgaggcgatcagcaccaccacgtactgctccggggtcagcggcacaccgctgtactgcgcgatgaacaccgcgcacagcgccggatagatcgcgccgcagccatccatcttgatgctggcgcccagcggcaccgcgaatgaaccgtagtccttgttcacgcccaggttgtgggtgatcgaacgcagcgccaccggcatcgcggcgaagctggacgagctgacgaaggccacctgcatgcccggcgccgcgccgcggaagaacttcagcgggttcaggccgtgcgccagcagcagcgcgctgtagaccaccacgatgtgcagggcgcaggccacgtacagggccagcacgaaatggcccagcggcagcagcttctcgaagccatagctgccgaccaggccggcgatcaggccgaaggtaccgatcggggtgacttccagcacgaagcgggtcacctggatcatgatgtcgctcatctggccgaccagcttgcgcgcctcggtcaccttctcgcccagcttgacgatggcaaagcccaccaggcctgcgaagaagatcaccggcaggatcgagccgcgaccggccgccagcacagtctcaccggccgcattgaccttggtaccgatgccggacagcgcgtagaagacattggccggcaccacgtccagcagcacctgcaccacactgggcacttcgcgcggcacgtagttgctggccattgtcagctgcagcccgccggcaccgggctgcagcacggtccccacgcccagcccaacgcataccgccagcgccgcggtgatcacgaaccacaggaaggtgcggccactgagcgcggcgaccgacttctgcccgtgcagcgacgagattgcgttgatgaccgcgaagaacaccagcggcacggcgatcatcttgatcagggtgacgtacagctcaccgagcgggccgaaccacgtttccgcggccgggccaagcgcccagccggccagcgcgccgagcacgaagccaccgaccacgcgctgccagaatggaatccgcagccaggcagagaccagcttcataggcaatccagaggggaaggaagggatgctggcacgatagcccaaggcggcccgcagaacgaccgcccggccggcaaatcagtgtgtcatcggcgtgccttgcagggacgggcataatgaacgtcccgttacagtttgtgagatcccagcgtccatgcgccgttccgtctccctgttggccgcctgcgccaccaccctgctgctgggcgcctgcgccagcaccacccccgcctctgccccggccggcctgaaggtcgccgtcgacccggtcgcccatccggccggcgagaccccgcaatggtggtaccgcagtggcgccgcccaggccgccgccaacggcgcgatgtccggcaaggcgaagaacgtcatcctgttcctcggcgacggcatgagcctgaccaccgtggccgcctcgcgcatctacgaaggccagcagaagggtggctcgggcgaggagaacctgctgtcctgggagcgcttcccggccacggcgttcagcaagacctacaacaccgattcgcagacgccggattcggccggcaccatgaccgccatcaccaccggcgtgaagacccacatgggcgcgatcggtgtcagcgccggcagccgcaccgactgcgccgacagcctgtccaagggcctgctgacctggctgcagctggccgacagcgccggcctggccaccggtgtggtgtccaccgcgcgcctgacccatgccacccctgctgccacctatgcgcactcgcccgagcgcaactgggaaaacgacaccgacctgactgaagcggccaaggctgcaggctgcaaggacatcgcacagcagctgctgtcgacctcgcgttatgggcgcggcccgctggtcgctctcggcggcggtcgcggtgaattcaccaccgtggaagagcgcgatccggaatacgacgacaaggtcggccagcgcctggatggccgcagcctggtgcaggaatggcagcaggcgcacccgcagggtgcctacgtgtggaacagcaagcagctggcggcggccgccaatgcgccggccatcctcggcctgttcgaaccggaccacatgcgctacgaatacgagcgcccgcaggatccgggcggtgagccgagcctggccgaactgacggctgcagcgatcaggaatctggccaggcaccaggaaggctacgtgctgatgatcgaaggcgcgcgcatcgaccacgccaaccacagcggcaacgcctaccgtgcactgaccgagaccgtggcgctgtccgacgcggtgcgcgtggccaacgaactgacctcggccgacgacaccctgatcatcgtcaccgccgaccactcgcatacgctgaacttcgtcggctacccggcacgtggcaatccgatcctgggcaaggtgaaggacaagggcggcgaagatggtgccggcaagctggactacgcgctggacggcaccggccagccgtacaccacgctgagctatgccaacggcccgggccataccggcagcagcaaccagcagccggccggcccgaagcgttacccgcacaacccgagcagcttcgaaccggccaacggccgcccgaacctgcgcgaggtcgacaccgagcatccggactacatgcaggaagcactggtgccgatgaagtccgaatcgcacggtggtgaggatgtcggcatctgggcgcgtggcccgggcagcaaggcgatccgcggcacgctggaacagaacgcgatctatcacatgatcgtgcaggccaccccggccctgcgcgagcgcctgtgccaggccggcacctgcgatgacaagggcgtgccggtgcagctgccggcaccgacggccttcgagcgcaaggccgaggccaagtgatcgtgcggcaggcccgcctcgaccgcggccgcttcgcgcggtcgctggtcctgctcggcgtactggccggttccagcgcgctggcgcaggcgccggcctgcaagctgctgaccgacgaacacgggttgtggccgctgcccaactgcgtggtggtcgatcaccggccgaagatcagcgccgatgcgctgaaggacctgaactacgacgaccacggcctggccgtggtgtatgccgaccagggcttccactacgtcgaccgcaagggccgcagcctgcctgtgctgacctgggacaacggcccggaaacaccgcaggaaggcctgctgcgcggccgcgtcggcaaccgtgtcggctacttcgacctgacgttccgccaggtggtgcccggcacctacgatttcgggtggccgttccaggatggcgtggccgaggtctgcaacggctgtcggcgcggcacgccggatgccgatggccacacgccgatggaaggcggagagtggttccgcatcgaccgcgcgggccgtcgggtgaagtaggtttttcggcagggctgcgccctgcacctgccgatgcaacggcaacggccgaagcaacagcaacagcaacagcgcgcattccgtgggatggcggggcggccggcaaccacggcggttgctgttgctcctggtaggtgtcgaccttggtcgacacgatttttctctcagatatcgaattgaatacggggtcagatccgttttccgcaggaaaacggatctgaccccaagagccattccgacagttcgcaggaaactgtcaaaggcgggatgggtccggttgcgggagtgtccgcggcatggatgccgcggccaagcccccatgggtgagggcgctttgcttgcgaagcactgcttcgcaagcgcccgaacgcacagccgccagcggctgggccggcctgggggtttacggcgtctcccgcaaccggacccaccccgcccaccctcaggaaaccagcttctgctgttgctgttgctgtcgccgttgctctggatcgtagcgggtgcagggcgcagccctgccgagcaaccctatacttgccgccgtgactgccttccctgccctcgttccgctggatgcgccactgctggtgggctacagcggcggtgtcgactcgaccgtgctgctgcactggctgtggcgctgcgccaaggcctccggcacggcgctgcgcgcggtgcatgtgcaccatggcctgcaccccgatgcggacgactgggtgctgcattgccagcagcaatgcgcagcgctgggcatcgaactggccgtgcatcgcgtgcagatcgaccccacatcgggcctgggcctggaaggcgcagcacggcaggcgcgacgcgccgcgttcgccaccgaactgcgcgacggcgaaacactggcgctggcgcagcacctggacgaccaggccgagaccttcctgctgcgtgccctgcgtggctccggcgtcgatggtcttgccgcgatgtccgcagacagccgcgtaggcgaacaccgtgtgtggcgaccgctgctggcggtgccgcgccgtgcgctgctcgattacgcgcaccagcacgcgctgcgctgggttgaagaccccagcaacgccgacgaccacgccgatcgcaatttcctgcgcctgcaggtgctgccgttgctgcgccagcgctggccgcacgccgccgcggcattggcgggcagcgccctgcattgccggcagacccgcgagctgctggacgaggaggacgccgagctgatcgcgcatctggaggtggcaccgcgtgtgctgtcgctgcagctgctgcgccaggtgtcaccgggccgcgccgcgcgcgtgctgcgtgcctgggtgatcggccatggggccgccccactgccggccacggtgctgcagcaggcgctggacgagctgctgccagccagcaacgatcgccaggcgcgggtgcgctggcacgatcatgccatccagcaatggcgcgatcatgcctatctcctgcccgcgcaactgccggcgcttccccatgattggcaggccggatgggatggacgcgcgccattggcgctgcccgatggcggtcagctgcacctgcacggcgccgaggccttcgaacggccgctccaggtccgtgcgcgtgtgggcggcgaacgcatcctgctgcccggtcgccagcattcgcatgcgctgaaggactgcctgcaacgcgaacaccttgccccctggcgacgcgcccagctgccgctggtcttcgatggagcgcagctgcttgccgccgccgacgtggtcatcgcagctcccctgcaggcctggttgcaggcccacgacgcgcagctgcagtggcgtcccggcggctggtgaattgacccccgcgcgcagcccgtccacacttgccgcatggccaagaagtcccccgaaaacgcctccccggtcgcccagttcgagcagtcgctcgaatcgctggagcagctggtggagcagatggaaaccggcgagctgagcctggaagcgtcgctcagtgcttacgaacgcggcgtcggtctgtaccgtcagtgccagcaggcgctggagcaggccgaattgcgcgtgcgcctgctcagcgatccggcccagccggaaacggccgagcctttcgatccgcccaaccatgacggctgaagccctgttcgcgcgctggcgcgaccgtatcgaaagccagctcgatgccgccctgccctcgcctgccgaagcaccgcagcgcctgcaccaggccatgcgctattcggtgctgggcggtggcaaacgcatgcgcccgctgctggtgtatgccagtggacacctgttcggcgcgcagccggaacagctggacgcggcggcgatggctgtcgagctgatccacgcctattcgctggtgcatgacgacctgccggcgatggacgacgacgccctgcgccgcggcaagccgaccacccacatcgccttcgacgaagccaccgcgatcctggccggcgacgccctgcagacgcgtgccttcggcctgctggccgatgcgccgctgccggccacgctgcgcgtggcctgcctgcagaccctcgctcacgcgtccggcgcctccggcatgtgcggcggccaggcgctggacatcgatgccaccggccagcagcagaccctggcggcactgacccgcatgcatgcgctgaagaccggcgcgctgatccgtgcagcggtgcgcatgggggcgctgtgcggccaggcccacgagccgcagctggcccagctcgacagtttcgccgatgcgctcggcctggccttccaggtccgcgatgacatcctcgatgtcgaagccagttccgaacagctgggcaagaccgccggcaaggacgaggcgcaggacaagagcaccttccccgcgctgctcggcatggacggcgcgaaggcgcagctgcgcgaactggccgcacgcatgcaggccacgttggccggccatggcgaagaggccgatgcgctgcgcgcgctggcaacgctggcggtggaacgcgatcactgatcgccgccggtgacgctgccctcaaacaggaacgcccggcaatgccgggcgttcctgcttgcgcatgcggccggtattacttgatcaggcgcagggtgaacgggtagcgataggcttcgccgttgttggccttgactgcggcaatgatgcagaacaccaggttgatgatgcccacgatcggcgccaggatgccgccgatgatcaccaccatcaggatgatgctgatgaccatggcgatggtcacggtgatctggaagttcagcgcttccttggcctggtcggtcacgaaggccttgctggcgtcatccttgttgatcagccagatgatcagggcgccgatgaaccaggtgaagatgcccagcaggtgcgcagccagcgccatggtgcgctggtcggccggggcatcggtggttgccggcggcggcgggacgttatcgaattcgctcacgacaaaactccttttcattgggtggtcttgacccaccagcaccaagctggttgcgtcaggcgcgcatagcttacgtcatcaatgccatcaatcattaccggcgacggtcatccgccccagcaggatcgaaccggtccggatgtgcgagcgcgggtcgacgtcgctgccgaccgcctcgatgctgctgaacatctcgcgcaggttgccggcgatggtgacgccgtccaccgggtactggatctcgccgttctcgacacggaagccgcccgcgcctcgtgagtaatcgccggtcaccccgttcacgccctgccccatcagctcggtcaccagcaggccgtcacccatctgccgggcgatctcttccagcgggccggcattggccgccagctgcaggttgtgcacgccgccagcattggcggtggtctgcaggcccagcttgcgcgccgaatagctgcccagcacgtagcgctgcagtacgccgtctcggaccagcgccgaactacgggtggccacgccgtcgccgtcgaaggcggccgagcgcaggccacggcgcaggtgcggcagctcgtcgatctgcatccattccgggaacaggcgttggccgacgctgtccagcaggaagctggcctggcggtacaaggcgccgccggacaccgccgacagcaggtggccgaccaggctgcgcgccacttccggggcgaacagcaccggcatgctgccagtagccagtgaacgcggctgcaggcgggccacggtgcgctcggcggcacgacggccgaccaggcccacgtcttccaggtcctcccgggcaagcgcgctggtgtaccagccatcgcgctgcatgccatcgccctgcccggcgatcagcgcgcagccgaccgaatggtgggtaccgcgctcacgaccaaagaaaccatgcgaattggcatacaccgacaggctctgcatgctcgacaccgatgcgccgtcggaattgcggatctgcgcgtcggcctcgcgaccggccgcctcgcaggccagggccaggtccaccgcctcatcggcctgcagcgcccacgggtgccaaccgtccagctccgggaagtcggtggccatcagtgcggcctcggccaggccggcagccgggtcatcctcggtatgccgggcaatcgcgcaggcctgctcgaccgtagcggccaggctggcctcgttcaggtcaccggtgctggcactgcccttgcgctggccgaaatagacggtcacggcgatgccgcggtcacgcgtggactgcacggtctcgacctcgccgaggcggacattgacctccagtccgcggtcctcgctgcaactgacctcggcctggctggcgcccagcgcgcgggcgcggtcgagcagctgctgggagaggtcggccagccgttccagccgggccgggctgtcgtcgccgacggccacttcaggggcgatcacgttcaatgctttatcctgtacaggttgggcccggcatcacgccgggcgactttttttgagatcaggtagggacgatgcgcggacgcgacgaagaaaccggtgaattccacgacaagagccgcagccagaaccggcgcgacgcgctcgacgtcctggccctgggcgagaagctggtgtcgttgaccccggcccagctggcgcgcctgccgatcccggaagacctgctgccgcatatcgccgagtgcaagcgcatcaccgcccacatcgcccacaagcgccagctggcgttcctggccaagcacatgcgccgcgaggacgaggcaacgctggacgcgatccgcgatgcgctggacgccaacagcgagactggccgccgcgaagtggcgatgatgcaccgcgtggaagactggcgcgaccgcctgttggccgacggtgacaaggcgctggccgccctgcttgacgactacccgcaggccgaccgccagcagctgcgcaccctggtacgcaacgcgcaggccgaaaaggcgaagaacaagccgccgcgcgcctaccgcgagatcttccaggtgctgcgtacgctgatgctgccggcggcgctgggcttgaagacggcgggcgacgaacacgccggcgatccggtcgacgaggccgacgaggactgagtccgcgccggcccgggcggtggccgcggccatcgccacgctcaggcctgcgtaccgccgacggtgatgccctcgatcaacagcgagggctggccgacacccacgggcacactctgcccgtccttgccgcagatgcccacgccctcgtccagggccagatcgttgccgaccatgcgcaccttctgcatggtctccgggccgttgccgatcagggtcgcgcccttcaccggggtggtgatgcggccatcctcgatcaggtaggcctcggtggccgagaacacgtacttgccgctggtgatgtcgacctggccaccgccgaagttcaccgcgtacaggcccttcttcaccgaacggatcatctcctgcgggtcgtgctcgccggcgcgcatgtaggtgttggtcatgcgtggcatggtcaggtgcgcgaacgattcgcggcgcccgttgccggtcggggccatgcccatcagccgcgcgttgaggctgtcctgcatgtagccgaccaggatgccgtcctcgatcagcggggtgcactggctcgggtggccttcgtcgtcgatgttcaacgaaccgcggcgaccgtcgagggtgccgtcgtcgacgatggtcacccccggtgcggcgacgcgctcgccgatgcggccggcgtagacgctggtgcccttgcggttgaagtcgccttccaggccatggccgaccgcttcgtgcagcaacacgcccggccaacccgggccgagcaccaccggcatcatgccggccggcgccggcaccgcgtccaggttcaccagcgcctggcgcagcgcttcctgggccagggcttcggggcggccgctggcgaacagcgcttcgtagccataacggccaccaccaccggcgtagccggactcgcgacggccgttgtgttcgacgatgacctgcacgttcaggcgtaccagcgggcgcacgtcggccgccagcacgccgtcgctgcgggcgatcagcaccgtatcgacgccgccggacaggctcaccatcacctgcttcacgcgcgggtcggcggcacgcaggtagccatccaggcgcttgagcacctcgaccttggcctcgttgccgatgccgtcgatcgggtccagcgccgggtacagcgcgcgcgcattgccgcgcagcagcgaacgtccggtctgcgcaccgccctcgcgcgagatcgcgcgcgccgactgcgccgccgccagcagcgcatcggcatggatgtcatcggagtaggcgaagccggtcttctcgccggaaatcgcccgcacgcccacgccctgctcgatggaatgggcgccgtccttgacgatgccgtcttccacgctccagctctcgcggcgggcgtgctggaaataaaggtcgccgaagtcgacaccagggccgagcagttgcccgaaggtgcgctccaggccggcggtatccaggccgccggggcgcagcaggcggtcttgggcaagcgtcagggcgatatcagtcatggtttcgatctgggggtgcgggggcgctcaggcaagccccgtgaacaggaagccgtgctcagcgcgagcgcggcaggtcggtgacggtcggcggaatggccggtgcaggtgccggcacgggcggtgatggggtcttgtcgcggctgcgctcgatcacttccaccttcggctccttccatggaccggtcaccttgtaggtacgggcgccaatctcgcccagcggcttggacaataccgcattggtggccgcgcccagcgccgcccccaccgggccgccggccaccgcaccgaccacggtcagcaggttgcccgcgcgcgggttgacgtcgatggtctggtcgaactgctggttgcgcaggtcggcctggccacggatggtgatgttggccgccgggccttcgatcagcaccttgtcggtgcgcgccatgccctgaccgaactgcatgctgccctcgatctggttgaacgcgaagcccttggagaagaagtcgcggaaatcgaacatcagccgccgcggcagctgcgcgacgctgagcaggcccagcacgcggccggcgcccggctccagctccagcagctggccattgcgcgcatgcaggtcgaggctgccctgcaggttgcccagctggaagtccgacggccccccgctccaggccgcctgcagctgcgcctggccggaaccgccgcgcagctggccgccgtaatcaaggttctgcatcagcccgcccaggtcctcgctgcgcacctgcgcggtcagttcggtacgggcgccgcccgtacggccgagccagcggccggtgatgtcgatttcctggtccggcgcgcggaagcgcaacgcgtccacgttcaggccgttggccagcgggcgcgtgcgcagcaccgcctggcccagcaccaccttgccgaacttcaggtcggcgatgtccagcgcgaacggcggcagcttggccgggtccatgtcattggcaccggcctgtacccgcgccggcgcggcggccgcacccggtgccgtcggcagtgactgccagtgcacccggtcaagctggccgctgatggtgccgccgtcggcgttgggtacggtcaggcggccggccagcgacggcccgtccaggcgcacgtccagtgcctgcgggcccgggtgcagctgcagccgggtctgctcgaagactccgccaatcagcttgagctggccgacctgcacgtcgaccgtgcgcagcggcatcgcgtcgtcgtcactcccaccgcgcgccaggctgatccactccagcgcatccagggtcgggctgcggccattgaccgtcagtccgctcgccggcggctcgcggtcgacatggtcgctgcccagcgtgacctgcacaccggtctggttgttgtggctgcgcgcggccagggccaggcgctggccgaacgccacatcgatgcggccggcgcccatcggcagctgcgcggccaccgtggtcgccagcggctcggcggccggcttgtccagcggcgccggcaggtcgagccgggtgccgaccaggtccgaactcaatcgcagctcgctcggcggcgcaggcgcgccgggcgccaccttgggcaggttgacgccgatggtccaggccgaattgccgttgatgtaaggcttgagccaggccatctccggagcacggtcgatcagcacgctggcatcgaggcgggcggtcagctgcgactcgaaggcgcgcgtgctgtcatgcacgtaaccgccggcacgcaggctcagccgtccttcctggccgaggtggcgcaccgctaggtcctcggcgccgaaaccgccattgctgtagcgcgcctgcccgtgcatgttgtcaaaggtcagctggaagcgcttgtcgaccagcttcacgccggccagatcgaccgtgccctgcaggtggccctcgccctcgtcctgatgcagcggctgcagcagatcgaaggtcacatgggccggaccactggcgaccagattgtccagcgtatcgccgtaatccttgtgcaacgggctctggcgcagcatcgccagcagcttgccggcctcgctcggcgcgtcggcacgtacgtacaacggctggtgcccgaagtccggaatgcccgcttcgaatttctgtaccgccacgccggcaagatcaccccgtccacgcatgtcgaagccagggccgatgaaggcgatgtcggcgtcgacctggctcatcagcggccagtcgtgctggaagcggatgtcgccattggtgatgtggccggtggcctcgaagcggccatcattgttgtcgaacggccagtcgtccaggtcaccggtgaccaggccgacgccattgcgcacctggccgccagccagcgccatgtccagccagtcggtggcgcccttgctcatcttggagtggatccagaagcgcttggccgccgtcatcggcacgtcgtccagcttcgcggccagctgcagccacggccgcgtgccgtcgccctggaaccagaccccgccgcgcacgtcggccgcgtagtcggtgccttccacacgcatcgccggcgtcccgatccgccaaccaccgccctcgtcgcgccagcccacgatctgtccggccaggtgcaggtcatggcgcacgccgaagccggtcggccaatcgaactgcagctgccgttgcggttgcagctgcaggctgaagccgtcggcgtcgccttcaaagcgcccgcccaggccgcgcaggccgggcgagttgcccacgctggcgaaacccagcgactgcagttcaccctgcgcccacagggggccatcgcgttcgcccgacagctgcaaggcgcgcacgtccagctgcggcctggacaggaacagccagcgacgcaggcccggctcaaggcgatcactcagggccagcgcacgcagtgcgatgccggcctgcacttcaccggaacggacctgcagctgtttgccgacctgcagctgcaggccatcgaggcgctgctcgccgtcttcattcttcagccgcagctgcggtacctgcagcgcccagccctcggcctggcgctgccagcgcaggcgggcctgcagtcgctgcagctgcagctgcggcgccgccatgccgggtatcggtgcgccatcgatacgcacgtcgcgcagatccgaatccgtggtcagcgccaccggcgcgaaatcgcgcagggtcaaccacaggttcaactcgcccttgccctcgcgcaggcgcacgccgccagccgccagcaagggcgcccaggcgtggaaatcgaccgggtcggcgcccagccaggcctcgccgttgccgcgcgcacggtccacgtccagcaccgcggtcagcggcagcgcttcgggctgcgcccaggcgcgtacgcccacgcgcaggcgatcgccattgacccgcatgcgcaggtcgatgcgcggcagcgtcgtgtcgatgcccaacgtcggcgcgtgcacgcccaggcgccctccgatcacctgcagctcgcccagccggcgcagcgcatccagcggatcgccgccgttgtccgattgcggcagcccgcgcaccgtccagcgtccgtcctcgccctgctgcagatccagcgccaggccacgcaggcgcagctcggtcagcgagcgcccgggcagcagcccgctgtacatcgataccagcacctcggcctcgccgatcgccaggccctgcccggcgccgatgcgcaggcctttcagctgcagcagcgggccacgacgggtccaggcggtctgcagctggtcgaaacgcaccggctggccggcacgctcgctcagccaggcggcaatcctgtcaggatgacgctcggccagcggcagcagctggctgagcgtgcccaccagcagtgcaagcccgaccaggcccaccgcacaggcggcaatgaaatgacggcggatccttcgcagtcgcaggcgcggcggcgcgctcatcggccaccgccggcctgcagccggcgaggatcagagcagaacgacatcgaattgctcctgcaggtactgctcgtccgcctggaagcggatgctcttgccgaggaactcttccagctcggccaccgccgaggattcctcatcggtaattcgcgcgaccaccttggtcgaggcgatcaccagcaggcgcgcagcatcgaactggcgcacggcacgggtgatctcgcggaagatctcataggtcaccgtctcggtggtcttgatgctgccgcggccgctgcactgcgggcaggtctccgacagctggcgctccaggctttccaccgtacgcttgcgggtcatctccaccaggcccagcggcgagaaatcatagaccgtggtcttggcatggtcgcgggccagcgccttttccagcgtgcgcagcacctggcgacgatgctccgcatcatccatgtcgatgaagtcgatgatgatgatgccgcccaggttgcgcagccgcagctgccgcgccaccgcctgcgccgcttccaggttggtgcggaacaccgtttcttccaggttgcgctggccgaggaacgagccggtgttgacgtcgatggtggtcatcgcctcggtctggtcgatcaccaggtagccaccggatttcagcggcacctgcttgtccagcgcgcggccgatctcgtcctccacgccgaacatgtcgaagatcgggcggtcaccggagtacagctccagcttctcggccagcaccggcatgtacttggcgacgaaggcctgcagttggccgaaggtctccttcgagtccaccttcaccttgtccacgtccttgcggatcaggtcgcgcaccgaccgcagcggcaggctcaggtcttcatagatgatgctgcacgacggcgcttcgcggccgcggcgctcgaccacgttccacacgcgcgacaggtaggcgatgtcctcggcgatggcctcggccggctgcccttcggcgttggtgcgcacgatgtagccgtagccgccgtgctgcgccgacaactcggtcaccagcgccttcaggcgggcgcgctcggtttcatcctcgatgcgcgcggacacccccaccaccttggactgcggcagcagcaccatgtagcgcgagggaatgctgatctgcgtggtcaggcgtgcacccttggtgccgatcgggtccttcaccacctgcaccacgatgtcctggccgtcacgcagcagctcgacgatcggcacgctggccggcggcggcagggtcgtgttctcggtgtcggcactggccaccggggccgggcgcaccacgtcgttggcgtgcaggaacgcggcgcgctccaggccgacctcgacgaaggcggcctgcatgccgggcatgacccgctgcaccttgcccttgtagatgttgccgaccacaccccggcgccagccgcgctcgatgtgcagttcctgcagcatgccgttctcgatcaccgcgacccgggtttcgcggggggtcacattgaccaggatttcctcagacatcggcagcctccctggcggcatcggcagtgggggccggcacgccacagcgcgccagcagacgatcggtatgcagcaatggcagccccatgacgccggagtagctgccggaaagatgttcgatccagcgctcggccccgccctggatggcgtaggccccggccttgtccaacggctcgccggtggcgacataggcggcgatgtcggcggcggcgatcggggcgaaggtcacttcggaaatgaccagttcgctgtccagcccgtcggcgccgaccaccaccaccgcagtcatcacctggtgggtgcgcccggccaggcgcgccagcatcgcgcgcgcgccggcggcgtcggccggcttgccgaacacttcaccgtccagcaccacctcggtgtccgagccgagcacccgcgcctgcgggtcttcggccagcacccgggccagcccggcgcgcgccttgtcggcggcgacccggcacacatactgttcggcactctcggtcgcggcgcgctgctcgacgacctccaggtccagggcctggaaggggcgtccgagtcgggccagcaactggttgcgtcggggggagcgggaagcaagatagagcatcggcacagcataacctgagcccgtcacctgaatcgtcggcaacccgttacggaacgcgtacaaccccggacaggctcacagcgcgttcatcgctacgacaccaccctcaccgcacaacaaggagatcccatgcgcctgaccgccaccccgctgctgctcgccctgtccctcgcccttggaacctcgatgactgcccatgctgctccgtcgtcgccgtcgatcgccgccgcggccgaaggcaccctgctgaacatttcggccaacgccgaggccacccgcgtgccggacgtcgccaccctgtcggccggcgtggtcacccaggccgccgacggcaacagcgccatgcgccagaacgcccagcagatggacaaggtgttggccgcgatcaaggccgccggcatcgccgagcgcgacgtgcagaccagcggcgtcagcctcaacccgcagtaccgctatgccgacaacgaggcgccgaagatcaccggctaccaggccagcaacacggtcagcctgaaggtccgtgacatcgccaagctcggcaaggtgctcgatgcgctggccgctcagggcgccaaccagatcaacggtccgcagtttgagatcgaccagcccgaaccggtctatgacgaagcccgcctggccgcgctgaagaaggcccaggcccgcgcccagacctatgccaagtcgctgggcctgcaggtgcgccgcatcgtcagcatctccgagaacagcagcggcggtttccgcccgatggcgatgatgcgcaccatggcggccggtgcggcgatggacaaggccaccccggtcgcaccgggtgaatcgaccctctcggtcaacctggacgtggtgttcgaactgggccgctgatcgcggccgccacggtcgacgacacaggcgggtcccgcagggggcccgcctttttcgtgcccccgccgacactggctgaaggccagcccaacgatcatgcccctgcctctaggcagtagccgtcatgccgcgctactgatggactgccagccgcgtgcggcaaccccgccacgggccctggtgcgttgaggacttcgtcactggcatggaggtggatcatggttcgtacgtaccccgttgcatccctgcatttcgaccccgcccgggtggccgcctggagcgcggcgatcgctctgcacctgctggccttcctgttgctgctcatccctgcgacctaccaggccgtgcaggtcccgcgtgaaaagacgccggtccggctgatcgagaagatcccgccaccgccaacgccgccggttccggtcccgcccaaggagatcgtccaggtggtgccgaaaccgcgaacgcagccggtggtaccgccactgccggcgcccaccgcgaccgtggaggagacccagggcatcgcgctgccggccgccgaaccggctccgccgcagctggcgcccagcatcgacacgtccacccctctggccggcgcccagctgcagtaccgcagcgccccgccgccgacctaccccatccagtccctgcgcaaccacgaacagggaacagtgctgttgcgggtggaggtggacagccatggccaaccggtcgcggtcagcgtcgagcgcagcagcggctcgcgcaacctggaccaggccgcccgccagcaggtgctccggcactggcgcttcgagcctgcccagcgtgacggcgtggcagttccggccatcggcctggtaccggtacagttctcgctgcccgactgagccccaccaccggcccggcctcgcgccgggccggtccctgccgctgcccgggaaatgcggagaggccagggaccaagcgttaccgattaagcaaaatttcacgacttcgtcacctgcaggaaacctagattggcgcgtcccggtatcgatccggcgacagccctcaacgctacggttttccagttaggagagaagctgtgaaacacccgatccaacggcccgccagccgccgccgcagcaccctggcatcgtccatcacccacatcctcaccggcggcgccctgctgctggccggcgccgtcgcttcctcctccgccttcgcgcaggaaaaggccaccaacctcgaccgcatcacggtcaccggctccaacatcccgcgcaccaacaccgagacaccgtcgccggtgcaggtggtgacccgccaggaaatcgaccgcaccggcaagacctcgctggccgagtacctgcagaccatcaccgccgatggcgccggctcgattcccaagaccttcggcaacggtttcgccggcggtggcgccggcatctcgctgcgcggcctgggcgccggctcgacgctggtactgttgaacggccgccgcatggccacctatggcctggccgatgacggacagaaggtcttcaccgacctcagcaccattccgctcgatgccgtcgagcgcgtggaagtcctgaaggacggcgcttcggcgatctacggctccgatgccatcgccggcgtggtcaacatcatcctgcgcagcgacttccagggcgccatcctgcgtggctcctacggcctgtccggtgacagcgatggcgacgcccggaaggcaaccctgaccgccggtaccggcgacctggccaccgatggctggaacgccttcttcagcctggacgttggcaagaccgacgcgatcaagatcagcgaccgcaagaaccgcaagtggatcggtaccggtgacacccgcccgtggggctatgacaagaccgcccagttcctcggcggtgcctacacccgtggcggcacctccggcggttccggcccgaacggctcctacctcgacgccaccggccatctggtgccgctgccgggttgcgccggcctgaccaccatcggtgggcagaccccggccagcatcgccgccgatggctgcctgtgggatccggcgcagcagtaccgcgacctgattccggaagagaagtacgtcaacgtgttcggtcgcgccagcttcgccttcggtgaaggcggcgagatctacaccgagatcggctactcgaagaaggaaaccatcttcagcaacaccccgtccggcgtgtcgggcggctggggctatccgggcggcccggtcaatgccaacagtggccccggtgccaccgtgctgggcccgaaccatcccgacaacccgaccccgggcacggcgcgccgcgtgcgttactcggcctgggatgtcggcccgcgcgtgaccgacaacaccaatgagttcaaccgcttcctggtcggcatcaagggcaactggggcgactggagctacgacaccgcctacctgcactcgggcaccgacctgaccaacaagcgcaccggcttcctgcgctacagcgccgtccagtgtgcactgggcaatgccaactgcgccggtggcgtgtggcgtatcggtgatgatgccggcaagaactcgcaggcgctgtacgactacatctcgcccacgatcagcgcccgcgccaagtccagcctggacatgttcgacttcaccgtctcgcgcagcctgatggacctgaagggtggtccgctgggcctggcgatcggtaccgagtggcgcaagaccagcaacagcctgaccccgcagacctacaccgaccagggcgacatcatcggcctgggctactcggcctatgacggcacccagaacgtctacgccggctacgtcgaactgtcggcaccggtgctggaacagctggaactgtccggcgccctgcgttacgacaagtacgaaagcggcgaaggcaaggctacgccgaagctgggcgtgaagtggaccccggccgactggatcgccctgcgcgccagctacgccgaaggtttccgcgcgccgaacccggccgagaacggtgacggtggcctggccgccttctccactgcggtcgacccggtgcgttgccagatcagcggcggcgctgccagcgaatgtggcgccaattcggtggcgatcatcaccaagccgaacaagctgctgaagccggaagagtccaagagctactcggtcggcatcgtgctgcagccgacttcgaccacctcgatgaccgtcgatgcctggcagatcaagcgtaccaacgagatcgtgcagggcagcacggcggcggcgatcctggccggcaacgtgctgcgcgacagcaacaatctcaatggcgtggccaacagcggcaccatcctggcggtcaacaccggctacgtgaatgccagctcgtcgcgcgtgcgcggtatcgataccgatatccgccagaccttcgagatcggcccgggccagctggagctggacctgcagtggagccacatcctgaagttcgagcgcaccgaaggcggcgacacagttgattacgtgggtacccacggcaactgcgacgtcaccaactgcatcggtacgccgaaggacaaggtcaacttcggcaccacctggaagcagggcccgtggagcgtcagcggcatcgtcaactacatcagcaagatggacaacatcgacagccgtggtggcagctacctggccttctacgctgacggtacgccggtgaagaagatctcttcgttcaccacgatggacctgtccggtcgctggagcatcaacgactcgttcgaactcaacgcctcggtggccaacgtgttcgaccgcatcgccccgctcgatccgaccacctacggcgcggtgaactacaacccgatgcacttctccggtgcgctgggccgttactacaccgtcggcttcaagtacacgttcaagtaagaccggttgcagcgtcaccttcgaaggcccgggccgttgcccgggccttcgtcgttttcacgcgggccggttcctgcaggctggtgcttgcctgctgactcttgcggacatgttcacgaggacatggctaccgtatgctcgcggcattcgcgccgcaggggatctccatggccgcgacatcgcaacggctgggcctgcccgcgttgactgcactggtagtcggctcgatggtcggcgccggcatcttttcactgccgcagaacgtcgcgcgcagcgccggcccggccgccgccttgatcggctgggcggtcagtggcgccggcatgctgatgctggccttcgtgttccaggccctggccaatcgtcgccccgacctggataccggcatctacgcctatgcgcgcgaaggcttcggcaactacatcggcttctccgcggcgtggggctactgggtggcgtcggtgctcggcaacgccagcttcttcgtactgatcttcagtggcctcggccacttcgtgccggtcctcggcgaaggcaatacacccgccgccgtggccgcttcatcactgctgctgtggaccgtgcacctgctggtgctgcgcggcctgcgcacggccgccatcgtcaacggcctggtgacggtggccaagctgctgcccatcgcgttgttcctgatcctggcggcgggcgcgttccgcatggacgtgttccgcgccgatttcctcggtacgcccgcactcggcgacctcggccagcagctgcgcggcatgatgctggtgaccgtgtgggtgttcatcggcatcgaaggggccagcatctattcgcgacgtgccgcgcgccgtgccgacgtcggccgtgccacggtgatcggtttcctcggggtctggctgctgctggtactggtcagcctgctgtcgatgggcgtgctgtcgcaggccgaactggccgggctgcccaatccgtcgatggcctacgtgctgcgcgccatcgtcggcgaatggggcgcgacggtgatcatcatcggttcgatcgtctccgtactcggcgcattgctggcctgggtgctgctgtgcgccgaagtgctgtatgccgccgccggtgatggcaccatgccggccttcctcggccgcgagaacgcgcgtggcgtgccggccaatgcactgtggttgagcaatggcctgatccagttgttcctgctgatggtgctggtcagttcgggcagctacaccgggctggtgctgctcgctgcgtcgatgagcctggtgccctacttcctgtccaccgcgttcggcgtgcagctggcctggcgcgggcaggcctacgccggcgaaccaggcgtgcgctggcgcgatttcggggtcgcactgctggccagcgcctatgcgctgtggctggtgtatgccggcggcctggacaacctgctgctgtcggtactgctgtacgtgcccggcgtggtgttgttcgctttgacccggcgccagcgcggcgagcgggtattcacgcgctgggagtgggtactgttcggcgcgatcctggcggtggcgatcgccacgctggtggccttctgcagaggtgagctggcactgtagagccgagcccacgctcggcttcacacaggcagccgagcatggctcggctctacaactggcgttccgccagcatgccgatatcctgcatccagcgctcggccagctgcggccacgccgcgaccggtgcatccttcatgcgcagcccgaatgcgtggccgccgcgtgcgaacagatgcatttccaccggcgcgcccgcgtccgccaaggcacggtaataggccagcgattcgcgcacgtcatcggtgcgatcgtcggtggcctgcgcgatgaacgtcggcggcaccttgtcatccacggtgatgtccctgaccagcgacaatcccttcccgtgccctgcccacaggtgcccggaatacatcaccatcgcgaaatcgggacggctgggttgctcatccgcagcatcgaccggcgcgtagctgcgcagcgcgtgcgtgctcagtcccgccaccacgtgaccaccggcggaaaagccgatcgccccgatccgcttcggattgatggaccagcgctcggcctgtgcgcgcagcaggcccattgcacgctgtgcatcctgcagggccatcggcactttcggaatgtcgcggcagttgcactcggggtcccggttcgggccagaggctggcacccggtacttcagcaatgcacaggtgatgccctgtgcggtcagccagccgcagatctcgctgccttccaggtccatcgccagcacccgatagcctccgccaggcaccaccatcactgcggtgccggtggccggtcccttcggtggaaacacggtgagggtcggcgcagcgacgttctgcagcatcatccagtgttcgccactggcttcggagatcacttcgctgacctgctcgggccccttcaacttcggcggcgcgctcaccgtgccctgcggccacaacggaagctcggtggtgccctgtggcggatgccaggtggaaggcgcggccttcgttgtggcgaacggcaccatcgccagcagcaggaagctcgaggacagcagcacgcgcatgatcggcatccatggttgcagcagcagagtgtagcgacaaaaaaaaacctgcatcttgcgatgcaggtttctcaaggtggcgcccgaagttggactcgaaccaacgaccccctgattaacagtcaagtgctctaaccggctgagctattcgggcagacgactagtataaccactcttcacgcgcgatggtaggggtgattggcaatcattgcggcggcccgatacagctgctcggccaccaccaggcgcaccagcatgtgcggcagcgtcagcggtccgatcgaccacttctcatcggccagcgcggacacctccggcgaatgcccttccgggccaccaatcaggaacgccaggtcgcggccctgcccgcgccaatgctccaggcgctgtgccagctgctcggaactcagctgtcgtcctggcacatccagtgccaccacataggcgttcttcggcagcgcagcgatgacccgcttgccttcctcttcagtggcgcggcgcggatcacgccccttgccgcgcaagccgggctcgatttccaccagctcgaacggcagccagtgcgacagccgcttctggtactcggcgaagccctgcgcgacccagctgggcgcgcgttcaccggtggcgatcaggcgggctttcatctacacggacctccaaaacgtcgacggcgccatcggcgccgtcgaagggatgcatcaacgtgcggctcaggccacttcgtcgtcgctggacggcggctggtcgccaacggtccacaggcgctcgagggcgtagaactcacgcacgcgcggcagcatcacgtggacgatcacgtcgcccagatcgaccagcacccactcggcttcgcgctcgccttcaacacccagcggcatcacgtcgatgttcttggcgaagcgcacgacttcatcggcgatcgacttgacgtggcgggtcgaggtgcccgaaacgacgatcatgtagtcggcaacgctggaccggccgcgcacgtcgatctcgaccaggtccttggccttcaggtcttcggtggcttggcggacgctggccagcagttccggcacggacggcggcgggctgggcagatcgaccttgatggtctggggctgggtctggttgctcaaagtggatcgactcgataaacgtgggggcgattatacggggatggcacggcggcgccattcacgctgtggccgggcggtacagcccgtgtgcagcgacgtagtccgcgacggccggcggcagcagggcgcgccaggggccaccggcggcgatctgcgagcgcacggcgctggccgattcctcgcgcagcgggtggtgcaggcgcaggatgcgcccggccgggctggcgaacagggcctgttcgttgtcggcccagcgcccctgcagggcacgccccagttcaccgtcgatcgacgcctgcagcgggctgcccggccgctcggccaccacgaagtgggccagcccgaacagggcctcccattcgtgccagccggacaggcccagcaggctgtcggcgcccaccagccaggccagtggccggcttgggcccagctcgccacgcagctcgcgcagggtatcgacggtgtaggacggacgaccgggatagcgcgtggcacggtccagttcacgacggtccagcagcaggcccggttcgtcgccgatggccagcgacaacatggtgcagcgctgctcggcggtagcgccgggcaccgcacggtgcggcggatcgcctgccggcaacatgcgcacggccacctgcagttcgtcccgggcggctcgcgcgattgccagatgccccaggtgcaccggatcgaaggtgcccccgtaatagatccgcaggctcatcgctcaggcccgcgccagcaggcgcacggcacgcggttcggccacggccaccagcaggcgctccagcgccagccaggcatcgccgtcggcccgccccttggcgatgcggtcgaccagcccggcttcggccacgaagcgttcccagcgcttgccttccgggtgccgctgcagcgcgcgcttgtagggcgcctgccgtgattcccagatgccacgcgatttcatttcggcggccaggttgccgccacgggcctgcacacgggccaggccggcaccggccagcagttcacggatcacgatcggcatcagtgcggccaccgcttcgccttcgccgcgcaggccagccagcatgcgcagcacggccggcggctggccggagaacgtcgcctccaccagccggaacacgtcgtagcgggcagcgtcagccaccagcgattccatccgctccacatccagcggctggccatcggccaacagcgccagcttgtcgatttcctgggcggcggccagcaggttgccctccacccgctcggccaggcgttgcacggcggccgggtcggcacgcaggcccttgccgcgcaggcggcgctcgatccagtccggcagttcgtgcagtttgatcgcccaggccaccgacagcacgccgatgcggctgaccgcctcggcccacttgccctgatgggccttgctccattcattggcggtgatcatcagcaccacgtccggcgccggattggcgcagaactggctgatcacttcggcgccgtccttgccgggcttgccgctgggcaggcgcacctcgaccaggcggcgggcgctgaacaggctgggcgcattgaagctggcgtcgagctggttccagtcgaaatcccgcccgtcggcgtcgaacacttcgcgttcgccgatgccggaggcgcgcgcgcgcgcgcggacggcatctgccgcctccagcacgcgcagggtttccgggcctgcgatcaggtacaccggcgccaacggggtgtcagcgccctggctggccagctgctccggacgcagttccatcgtcgcttccgctcagtgcttggcgtcggcggccggcaccgcaccctcgatcggtttggccttcggcgcggacaggctgccgcccttctcgatctcggcgcggaccacgctgtcgatacggcggatgatcgaggcggacatttcccggcgcagctccgtggccaggatttcgcgttcggtggtggtaccggtggcgtcggtcggcggcgacacatagtcgcgcgacagttcgatcacctgctgcggcaccagttcgctgccatcctcgcgacggaagatgaagatcaccgcgtagcgcaggctgtattcctgtgcgcggccctgcgagtcgatggcgatcggcaggtcaccccagcgctcggacagcacctgcagctgggcgttgggtcccttgctgtcctcatcggccagcttggcaccggaggccagcaggctgcggttgagcagcttgaccagttcactgtacggggcggtggagaccaccttcaccggggcagtgtcggtcggcagcatcagcttgttgcgcagatggaaaccgcagccggcgaggccgaggacaagaacgagggcaagcaggattcgggtcatggagacagtctggcggagccgggcgatcacggcaacacacagcgtgcccgaagccgcgtgaatgcagggccatcaggcgcccggccctgctcatgaaatggcaccggccaccgcgcgggtgaccggtgccggggacatcaggcagcgacgatgttcacgatcttgcccgggacgatgatgatcttgcgcaccgtcaggccttccatgaacctggccgcgttgggctcggccagggccagcgcctcgacctgctcgcgcgcggcatcggccgccacctcgatggtgccacgcagcttgccgttgacctgcaccgccagggtcagcgcatcgcgcaccagcgcgctgctgtcggcccgcgggaacggctggtcttccagcagcgtctcgccatgacccagcacctgccacagggcgtggctggcatgcggggtgatcgggttgagcagcagcacgatcgcctgcagcgcttcctggcgcaccgcgcggccctgctcgctgccatcctcgaacttggccagcgcgttcatcagctccatcaccgcagcgatcgcggtattgaagctgtggcggcggccatagtcgtcaccgaccttgccgatggtttcatgggtcttgcggcgcagcgccttctggttggcatccagcgccgcggcatccagtgccggggcggcaccgtcggcagcgtgcttctgcacctgggcccagaggcggcgcaggaagcgggccatgccgtccacgccggcttcgttccactccagcgactgttccggcggtgcggcgaacatcgagaacaggcgcacggtatcggcgccgtacttgccgaccatcgcctgcgggtccacgccgttgttcttcgacttggacatcttctcggtaccaccgaccaccaccggctggccgtcggcgatcagggtggcgccggtgatgcggccgcgctcgtcgcgctgcacttccacgtcggccgggttgatccagtccttcgagccgtccgggttcgggcggtaataggtttcagcgatcaccatgccctggcacagcaggttgcgcgccggttcgttgctgtccaccatccgcgcgtcgcgcagcagcttgtggtagaagcggaaatacatcaggtgcaggatcgcgtgctcgatgccaccgatgtactggtccaccggcagccagtagttgccgcgcttgtcgaccgcatcacgggcacccggcgaggtgtagcgggcgtagtaccagctcgactccatgaaggtgtcgaaggtgtcggtctcgcgctcggccgcgccgccgcaatccgggcaggtggtcttgcgccattccgggtcggtcttgatcggcgagccggtgccggcgaaggccacgtcttccggcagcaccaccggcagctgctcttccggcaccggcaccgcgccgcacttggcgcagtagatcaccggaatcgggcagccccagtagcgctggcggctcacgccccagtcgcgcaggcggtagttgacgcggcgctggccctgggccttgcgctcgaaacgttcggccaaggcttcaaaggcgccctggaaatccaggccgtcgaactcggccgagttcaccagctcgaaggcacggctcttgtcgctgtaccagtcctgccagcggctaccgtcccagttgcgctcctcttcggtgcgcgcatccttcagcgcgatcacctgcttgatcggcaggccgtacttgttggccacttcgttgtcgcgctggtcatggcccggaacggccatcaccgcgccggtgccgtagcccatcagcacgaagttggcgacccacaccggcaccggctcgccggtgaccggatgcagcgcgcgcaggccggtgtccatgccgcgcttttcctgggtttccagttcagcctcggacacgccaccctgcttcaggtcggccagcatcgccgccagctccgggttgttcttcgccgcatgcagcgccagcgggtgctcggcggcgatcgacacgaaggtcacgcccatcaccgtgtccgggcgggtggtgaacacgcgcagcgggtccagcgcgctgccatcgacatcgcgcacatcgaactggatctccaggccctcggaacggccgatccagttgcgctgcatggtcttgaccgattccggccagccgtccagctcgtccaggccgtccagcagttcctgggcgtagtcggtgatgcgcaggaaccattgcggaatctcgcgcttctccaccagcgcaccggagcgccagccgcggccgtcgatgacctgctcgttggccagcacggtctggtcgaccgggtcccagttcaccaccgcgttgcggcggtaggccaggcccttgcgcatcaggcgggtgaacatgcgctgctcgtggacgtaatagtccggacggcaggtggcgaactcgcgcgaccagtcgatggcatagcccagcgacttcagctggctgcgcatgtggtcgatgttcttgtaggtccacgccgccggcgcggtcttgttcttgatcgcagcgttttccgccggcaggccgaacgcgtcccagcccatcggctgcagcacgttgtggccggtcatgcgcttgtagcggctgatcacgtcgccgatcgtgtaattgcgcacgtggcccatgtgcagcgcaccggacgggtacggaagcatcgacaggcagtagtacttcggcttgtccgaagtctcgtcgacctcgaaggcacgggtggcgtcccagtactgctgggcggcggattcaacctgctgcgggtcgtaggcgttggtttcagcgctggtcatggaacacgcggatgcggcggcaaagcggtacagcgtaccgcagtgcggcaaatggctccaatcctgcctgccggacgccggcgccgcggcgctcggggaggcgtctcagcgcggacgcgacagcggcagggccgccgccagccagaccagccagcaggcgaacgcgagccgttgtgccatcggcgccggcagtgtgccctgcagggcgaacgccgccagtgcggccagcacgccgcagcccaggaccactgcgcccaaggcccggccatgcgcctggcgcagatgggacacgcccagcagcacggtgccggcgacgaaacccagtacccagatcatccaggcgctggcatgcaactggctggcgggcccatgcaggtcatccacgtccagtggcagcagccccatcgcggcaaaggccagaccggccagcagcagcatctggctgccgacccgtggcgcccagccagcagtggccggcagactgcgtcgcaggcgttcagccacccccaccgccagcacgccgggcagcacgaaacccagcaggttgaaggccagcgcatgcggtacaccgcgcgcacccagcagcgccaccgggtggcgagcctgggcatagccgtccaggccggcaccgaagccggccacggccaggacgaatacgactgccgcaagcagccccaaccaacgatcaagccggaccacggacattgcgcgcaatcacctggaaaggaatggaccacggcattgtcgcggtagcggcgcgatgcgccaagcgcggcgcattccagagcaattcaatatccgcctgctgcgcctaccgtgatgctcgaggcatggcagttccgccctgtcgcaagcgcgcctccccatcgaagcctgtcgcctccggctagtgggtgatccacacgctgcactgcgcccctgccggcccgccagcaccactcgagggcgtactccgtgatggcagggttgagaccgacatcgatcgtcaccatagaatcggtctccagatgccaagcgatgcctcccccatgaccgagacgacctacgtattcgacgccaccactgcgaccttcgaggccgaagtcctgcagaagtcgctgcagacgccggtgctggtcgacttctgggccacctggtgcgggccgtgcaagaccctgggcccgatgctggaaaagctggctgccgagtacaacggcgctttcgagctggccaaggtcgatgtcgacaaggaacagcagatcgcggcggccttccagatccgctcggtgcccaccgtgttcctggtcaagggcggccagctggtggacggcttccccggcgccattccggaaggccagctgcgtgaattcctggcccagcacggcatcgtgccggccgatgtcggcgatgccgcccctgaggatgacgccccgctggacccgcaggcgcaggtcgacgtactgcgcgcgcagatcgccgccgagccggacaaggatgagctgaagctcgacctggccctggccctgctgcagatcggcggcgtggacgaggccggtaccctgatcgacggcctgccggccaatctggccaccgacgaccgcgccgtgcgcgcccgtgcccgcctggccttcgccgctgcgctgaaggatgccccggcggccgaggtgctggaggcccgcatcgccgctgatggcaaggatctcaaggcccgccacctgcgcggcgtgcagctgctgctgggcgggcatgacgaggccgccctggcgcagttcctggaaatgctgcggatcgaccgtggattcgaggagagcctgccacgcaaagccttgatcgacgccttcaatgtgatctccgacgaggacctggtgggccagtaccgccgcaggatggcgtcgctgctgttctgaacggaagcccgctccgttcagaatccctgcactgaacgcgggcaataatgcgcgcgctggcggccttgcggtcgccacgatccgttcggggggatgaggtcggggccatggggtcttgcagctgcacccccgcattgccgggattgcaaactgtgaccgtcgtccgctctctgtcgttcgccatgcgtttaacgggcgccctgctctgcgccctcctcctgccgcctgccatcgccggcgcccaggactggaactaccgggtccggcccggcgacaccctgtgggacctgggcgggctgtacctgaaaccctcggtacgctggcagcagctgcagcagcacaaccgcatcgacaacccctaccagttgccgccgggccagctgctgcgcttcccgatcagctggctgcgcaccgaaccggcgccggcccgggtgctgtcggtgcgcggcaaggtcgagctgtccggtgccgatggcacggcgacccgtgcgctccaggccggcgagcagctgcatatcggtgacaccgtggaaaccgagggcgattccagcatcacgctggaatttgccgatgcctcgcgcctgcagctgcgcgaatactcgcgcctgcgcctggaccagctcagccgctatggccacaccggcatggtcgacacccgcctgcgcctgcagcaggggcgcgccagcaaccgggtgacgccggcgcgcggcccggcctcgcgctacatcatcgatgcacccaccgcgaccagcagcgtgcgcggcacggtgttccgggtcagcgccggggataccgggcacgtcggcgccaccgaggtcctgcagggcaaggtgcaggtcggcaacccccatggccagcggctggtacggccggggcagtccacccgcagcagcagcgccgatgcggcccccgccgcggtctcggccctgctgccggcgccggcgctgcgcaatgacgcgctgcgcctggcgccgctgccgaccctgcttgcctgggaaccggtcactggcgccgatcactaccgggtggaagtggtgcaggcggcaacgccggagatcctgctgttcgccacctccaccgccgacacccggttggcgatcggcgacctgccgcccggccagctgcgcctcctgttgcgcgcggtcgacgcacagggcgtcgaaggcctggatgcgagcgccgatttcgagctcagtgaccagccaccgccgccgctgaccgtatcgccgctgcatgggcagacgatcaacagcgaccgcccgcgcttccgctggagccaggcccccggtgcacgcagcagcgtgctgcagatcgccgccgaacccagcttccggcagccactgcaggagcaggctacccatgcgaccgacctgcgcctggcgcaaccgctgccgcccggacagtactactggcgcgtggcctcgcgcgatgccgaaggccaccagggccgctatggccaggcgctgccgctgcagctgagcaacgagccggtggacccggcactgcaaccgcccgaggccgcgcacggcgagctcaccctgcgctggcaggccggcagcgaaggccagcgctaccgggtgcaggtggatcgccgcggtgacttcaaggccccactgatcgatgaaaccgtggcccagccgcaggtgagcttcaagcgcccgtggagcggcacgctgcacgtgcgcgtgcagtacatcgacgatgacggccacgccggcgagttctcccctgcccagcagatcccgttgccatgccgcctgtgctacggcgccggtggcggtgcactgctgctctggttgttgttgtgaggcgctcgccgctgccatggtcgaagcggatcctgctggccctgctggccggcgtgctgaccatcgtggccagccagggccaatggctgtggcggcaggacgaggcggcctatgacgcactggtcggcaactgggactaccgccccgaccccagcgtgctgatcgtggccatcgacgaaggcagcctgcagcgtatcggccagtggccctggccgcgctcggtgcatgcccgcctgctggaccgcctgaccgatgccggcgccgaacgcgttgcgctggacctgatgctgtccgaacccgaccgtcgcgacagccgccaggatgatgagctggcggccgcgatccgacgcaacggccgggtggtgctgccggtgctggcggcaccggcggccggcgaccgcatggccgaggaaatgctgccgatcccgcagatcgccgccagtgccgccgcgatcggccacaccgatgtcgaggtggatggggacggcgtcgcccgcggcgtctatctgcacgccggtatcggacggccgcactggccggcactgggcctggcactggccgacctgccggcgggtgcggtacgcggcctgcccgaccccgacccggcgctgggctcgccctatcaatggcgtcgcgatgattacgtgcgcgtgcgctacgccggcccgcccgagcggctgccgcaggtgtcctatgcggacgtgctcgatgggcacgtggatggagcgatgctgcatggccgccgcatcgtggtcggcatgacggccagcggcatcgcgcctcgcctgctgaccccgaccacccgcgagttctggatgagcggcagcgagtaccaggccaacatcacctcgatgctgctgcagcacaagcagatcgacgtgctgccgcacgcctggcagcacgccatcagtggcgtgctggtggcgctgtgcgtgatcctgctcggcctgcgcctgccgtggctggtcgcgctgtgttcgctgccgatgccgccgctgctgagctggctgctgctgcgcaccggtgacctgtggtgggcaccggccagcgcgatgctgggcgtggtgctggcactgctggtctgggcggtgtggcggatctcggcctggcaccgcctggccaaccgcgatgccctcaccggcctgggcaaccgcctgcgcttcgagcagtcactgcagcaggaatgcgacgccgcgcggcgcagtggcaagccattgagcctggcgctgatcgacgtcgaccacttcaagcgccacaacgaccgccatggccaccaggtcggtgaccgcgtgctgcgtgatgtcgcccgcctgatcggcgcgcatgcccgtcgcccgcgcgacatggcggcgcgctacgatggcgacgaattcgcactggtgctgccggatacgccggccgagggcgcgcgccgggtgatcgaggacctgattgcctgcgtgcgtgcactgccggcgccgggcgacggcagcgatgacggcgtcacgctcaccatcggggtattcacccgcgtgcccgacggtgacctgcaaccgcaccatttcgtggaaggcgccgacaccgccctttaccaggccaaggccaacggccgcgacgggttcatgatcgacggcgggacgtgactcccggggtgcaacatacgcatgcgaatggttagactgggcacctcgcctcgcgccccggacccgcatgaacgcccgcctgttccgcttcggcatcaacctctggccgccgttcctgttcaccggcatccacgtcacccggatcacgcccgattaccggcagatcgacgtggcactgcgactgcggccgtggaaccgcaattacgtgggcacgcatttcggcggcagcctgttcgcgatgaccgatccattctggatgctgggcctgctgcacatcctcggccgtgactattacgtgtgggaccgggccggtgcgatcgatttcctcaagcctggccggggcacggtgcgcacttcgttccgcatcgatgatgcactgctggccgaactgcgtgccgaagcggccggcggcgaaaaggtgctgcgctggttcagcaacgatgtcgtcgacgaaagcggcgaagtggtcgcccaggtacgcaagcaggtgtacctgcggttgaagcctcacgcacgctgatccagcacgcgcgcgctatcctcggcctccctgccatggaggctccgatgcgcccgtatgcgcttgccacactgctgaccctgctgtccttcaccgcccacgccctcgacctgccaccggtgcaatatccgacgctgccggcccaggcggccaatgccgccggtttcgtcccgcagggctgggcacttgaatcgagtgtcgaaggcgatctcgaccaggatggccgcgcggacctggcgctggtgctgcgtcagcaggcgccacgcaacgtcatcgagcacgatggcttgggtccctcgccgtacgacagcaacccgcgcattctcgccgtggcgtggtcgcgcccgtcaggctatgtgctggcggtgcaggaccaccagctgataccgcgcccggacaatccggtgatgagcgacccgctcgaagacggcggcgtcagcatccagcggggcaccctgaaggtcgcactgttttcattcgccagcgcgggcagctggtcaatgggcacgaccgcctttaccttccgttggcaggacgatgcctttgcgctgatcggctacgaccagaattcggtgatgcgcaattccgggcagaccgagtcggtgagcgtgaacttctccactggcagggtaaagcggagcgaaggcagcatcgaggacgacaaggacagcgtgcactgggagcccctgcacagccgccgccgctggacgctgcagaccatcggtgatggctgggcattcgatccgctggcgggcagcgactgagacgctgctcaatcgcgcgcagcagcggccggggcgttctccatcaccagcggcaccgacagccatgggctctcgtcggtgctgcgcgacggtgaacgccgcggcacctgcagacggcggccatcggccgacagctgcggtgcccgcaccggcgagcggaactgcgcaggcaggcgctgcagcgcatccaccggatcctgcgcctgctgccgcagccagcgctgcgcgccgatcagccgcaccatcgcggcggcatcctgggtccgtgacgaataggccggatagaccgggcgggcaatatcggtcagcacgcaccccaggatgttcgacaggcagccaaagtcatgctgcggcggtgccggcaccggcagcgggcgatccgcttccagcgccgccatcgccgccgcgccgcaggcccagcccagattgcccgccgcgcgcgccagggtgctgctgcgatccaggaccagcaccccgccgaattcctgcgccgaagtttcgatcgcagcccggctcatcgcgtactcaccctgcatcgcacggcacaggctctgttcggcggccagcatcggctgcattgcctgatcgcattccgctggcaacggatggtcggccggcagttcgaccagcatgtcggccagcagttgggcattggcctgcaccaggctggcaccgatgatgctctccaccaggtaactgccgcccgtcaccagccgccggcccagctgaagccccctgcaactgccacgcagcgcaccgtcgatatcgccctgcacataggccagcgcgcgtgcgctggtggcatcgatcatcaggccataggtcggcatcggcaccaggatgccgtcgcccttgggccggaatggcgacacgaagtggtccgcatcggccagctggtccaggcgcgcatgcagctgctggtggccagcgtgggcatcgacgaagcgctgcgggtcggcgcgcacctggcccaggcagtcactggcggtcggcccgcagctggccgccggtcgtgatcgcagcgcgtcatggtcctccgccagctgcggtccggcgccgccattgccgcgcggatcggcctcccaacgctgcacgtcgcgggccagggcctgttcgcgctggcgcgcgtccagatcgtcgaacgcgagcgtccacagcagcgcaaaaccgttgtggccgtggacaggcaggcgggcctgcaggcgctgctgggcctgtagccgcgattccggcaccggccacatgcgcgaggcgcaccacaccacgatggccagcaccagaaggcctgccagggtccaacccagtccgcgcagaatcttcaacacagcttcccttccatgtgccgttgccgcagtcgattgcccagcgtaatcgagcggccgtgaccgctacaatgcgcacatgtcgctcgaagcccccgccctggtcccccgcccctccctgcagcgcctgttcctgaccggcctgctgaccctgctgccgatctggctgacctgggtcgtggtcaagttcgtgttcgtgctgctgtcgggcatttccagcccgttggtggtgccactttccgagcagatcgcgacaagctttccgcactacctcggctgggtccgggccgagtggatccagaacaccatcgccctcctggccaccctgctggtgatcctggcggtgggcgtggccagccgccgcgtgctgggccagcgcctgctgcgctgggtcggcgcggtcatcaagcgcattccgctggccagcatcatctacgacagcgccaagaagctgctggacatgctgcagaccgaaccgggcagcacccagcgcgtggtgctgatcgactttccgcaccgcgacatgaagtcggtcgggctggtcacccgcgtgatcaaggaacacggcaccgaccgtgaactggccgcggtgtacgtgcccaccacgccgaacccgacttcgggttacctggaaatcgtgccggtggaactgctgaccccgaccgactggaccgtcgaccaggccatgagcttcatcatttccggcggcgccgtcgcgccgtccagcgttccgttcacgcgcgccggcgatcgcagcgaatgaccgcggcgccgatcgagcgcccgttgcaggaccgcgcggtcctgctgttcatcgtgctggctgcgttcttctgcggcaatgcggtgctggccgaactgatcggagtgaagatcttcgcgctggaagacaccctcggcatcgatccgctgaactggaacctgttcggccagactggttcgctcagcttcaccgccggcaccctgctatggccggtggtgttcatcatgaccgacaccatcaacgagttcttcggcaagcgcggcgtgcgcttcatctcgtggctggccgtggtcctgatcgcctatggcttcctgttcgccttcgcggcgatctcgctggcgccggccagctggtgggtcacctccatggacgggcacggcgtgccggactaccaggccgcattcgcagcggtgttcggccagggcatgtggaccatcgccggttcactggtggccttcctgctcggccagctgatcgacgtggcggtgttccatcgcatccgccaggccaccggcgagcgccacgtgtggctgcgtgcgaccgggtccaccgcgatctcgcaggtggtggacagcttcgtggtgatctggatcgccttcgtgctcggcccgcagcactggccgacctcgctgttcctggccgtcagcagcgtcaactacatctacaagatgggctttgcaattgccctgattccgctgctgtacctgatgcggcgtgcgatcacccgctatctgggcgcagacagggccgctgcgctgcgcgcggcggcggcggctgactgaagccccagcggcggcaagctgactgcgccttcacgctggccgtacgcggccggatcgtgcaagctccacggtctgtgttccacggaagctcctgatgccgcatcccacccgcgccctggccgccgccatcgccgcgttgttcctgttcagtgccgtgccgtcggccgaagcagcgaaaaagaaggccagccgccctgccgccgcgcagacccgccaggctgccaagcccaaggccaggcccgcccgcgccaccgcgccggcgcgtggcagttcggcacgccgcgccgcgccgcgtccggtcgcgccggcacgtgccgtacccaagcaggtacagctggagcgcctgtacgacgagtactgggatgcctcgatgcggttgaacccgctgcaggccaccttccagggcgaatcccgttacaacgaccagctgcccaacatcctgtccgccgcctggcgccagcagtcgcacgacttcactacgcaatggctgggcaaggtcgagaagctcggcagtgatggcctgcagggccaggacctgctcagctacgagatcttcgtgcgcgacgcacgcgcctcgctggccgccgagcgctacccgggctggatgatgccgatcagccagtactacaacatcggcagcatcatggcgatcctcggtgccggtgccggcgcgcagccattcaacaccgtgcaggactacgacacctggtcgcgccgttcgctgggcattcccgaactgttcgaccaggccatcgacaacatgcgccaaggcatgaaggccggcgtggtacagccgcgcgacctgatggaaaaagtgctgccgcaactggatgcggtgatcaagccgaccgccgaagagagcatcttctggtcgccgatccgcaccatgcccaacaccatcccggccgaggacaaggcgcgcatcagcgccgagtacaagcgcatgatcgaactgcgcatcatgccggcctatcgcgccctgcgcggcttcatcgccaccgaatacctgccggccacgcgcgccagcagcggcctgggcgcactgcccgatggccaggcctggtacgccagcctgatcgtgcagaccaccgccagcgaccagaccgccgcgcagctgcacgcgctgggcgaacaacgcgtgcaggaactgcaggcgcagatcgccacggtgatgaaggatgccaagctgcgcggcacccccaccaagctgctgcgcagcatgcgcaacgaccgccagttccagtacggcgatgccaatgcgctgatcaaccgttaccgccaggtgcagcagcaggtcaacgcacgcctgccgcaggtgctggataccttgccgaaggcgccgctggacgtacgcgcggtggaaccggagcgtgcgctcaccgccgctgccgctgcctaccagccggcactgcccgggcaatccgcggtgctgtacgtgaacacccgcgacctgcccagccgcaagcgctggaacgtgccggtgcagtacctgcatgaagcgatccccggccaccacgtgcagctgggcctgcagcaggagctggccaagctgccgcgcttccgccgcctcggtggcgatctcgccttcgtcgaaggctggggcctgtacgccgaaacgctgggcgaggacctgggcatctacaccgatccctacgaccgcatcggctacctgtactcgcgcctgctgcgcgccgcccgcgtggtggccgataccggcgtgaatgcccagggctggagcaagcagcaggctgtcacctacctgcagaagaccgtggacatgagcagcgacgatgccaacgccgaagtcgagcgggtcatggcccagcctggccaggcactgtcgaacgtggccggcctgaccaccattgtcgccctgcgcgacaaggccagggcgcgccagggcgccgccttcgacctgcgccgcttccacgccgaactgctgaaggacggctcgatgccgctggacgtgctggaccgcaagatggaacgctggatggcccagccggccagcgccacgcccgccccgtcaccctgagccttccggagccgccatgcgtcctgccgtcgccctgttcgccgccgtgctgggcctgctgccgctggccaccgttgccgcaccggtgctggccccaccggatgcgggcatcgacggcctgatgcaggcctacgacggccaggtgcccggcgccgccgtactggtgctgcatgacggcaaaccggtattccggcgcggctatggcctggcggtggtggaggacggcacggcggtcaccgcggccagcaacttccggctggcctcggtcagcaagcagttcaccgctgcggcggtgctgctgctggtggaagatggccggctcgggctggaccaacctgcccggcaatggctgcccgaactgcccccggctgcggccgccatcaccatccgccagctgctctcgcataccggtggcctgcccgactacgaagacctgatggacccggctgatgctcggcaggtgcatgacgccgatgtgctgaccctgctgtcgcgccaggaccggctgaacttcgcgcccggcacgcagtaccactacagcaacagcggctatgcgctgctggcactgatcgtcggccgcgcctccggccaggatttcgcagccttcctgcaacagcgcatcttccgcccgctgggcatggcccacaccgtggcccatcaggacggcatcgataccatcgccgcacgcgcctatggctacagctggatcgatggccgttggcagcgcaccgaccagagcaccaccagcgccgtgctcggcgatggcggcatctattcctcgctggacgacctggcccgctgggatgcggcgctgtacgacgaccgcctgctgtcgaaggcctcgcgccgcgcgatgttcagccccgccacatcgacgcccgaaccggatgtaccgcactacgggttcggctggcggctgaatggccccgtgcaatggcacagcggcgagagcatcggcttccgcaacgtgatcgtgcgccacccggaaaaacacctgaccgtgatcgttctgaccaaccgcaacgaccccgaaccctatccgctggcgctgaagatcgcccagcgctggctggacaccctgcaatgaccgccgattccggtgccctgctgggcatccaccacgccgcactgatctgcagcgactacgcacgttcaaaagacttctacgtgcgcatcctcggcctgcgcgtgctggccgagaaccaccgcgccgcgcgcgattcctggaagctggacctggccctgcccgacggcggccagctggaactgttctccttcccctcgccgccgccccgtcccagccgcccggaagcccagggcctgcgccacctcgcgttccgcgtggccacgctggaacccttcatccagcgcctgtcagcgcacggcgtagtgtgcgaaccgatccgcgtggacgagtacaccggccgccgcttcaccttcttcgccgaccccgacgacctgccgctggagctgtacgaagccggttgacgtccccgggggtcagatcccttttccgacggaaaagggatctgaccccatcgccgccaccgaaaacgtcatccacgcatggcatggatctgtgtcgaccaaggtcgacacccaccaaccgcaccagcaccggcagatcgccggaaactgtcgaaggcggggcattgtgggtttgcggggtgtgagccgcatggatgcggcgaccaagcccccagggacgggtttacggcggccccgcaaacccacagtgccccgccatccctcagcaagtccgcttttgctgttgctccggctgttgcggctgcctctgcaggtgcagggcgcagccctgcaaagccccccttccccataccccgccgaatgggtatacagtcgacccatgccggcaccgtgccggaatgaaccctgggaggggaccatgcgcaacaccttcaagaccctgctgctggcactgccgctgtgcctggccgccctgtcggcccaggccgccgacggcgccgccggccgctggaagaccatcgacgacaagaccggcaaggtgaagtcgatcgtcgagatcacccaggccgccaacggcaccctgaccggcaaggtggtcgacatcctgcactcggacaagggcccgaacccggtctgcgatggatgtgaaggcgccaacaggaacaagccggtgaagggcatgaccatcctctggaacctgaaggccgatggcgccaacaagtggtccggcggcaccatcctcgacccggccaacggcaagacctacaagtcgaagatggagctgcagccgggtggcaccaggctggacgtgtccggctgcatcgccttcatctgccgcgcgcagacctggcagcgcgaataagcgccccggcccccgcttcatccccgtgacccggccccggccgggtcacgtcgttgcgggcatgcgatactctgcggttcccctcggcttcaccccgcgaccatgacccgtaccgcgctcgtcaccaccgccctgccctacgccaacggcccgctgcacctgggccacctggtcggctacatccaggccgacatctgggtgcgtgcgcggcgaatgagcggcggcaaggcctggttcgtctgcgccgacgacacccacggcacgccgatcatgctggccgcggaaaaggccggggtcaccccggaaaccttcatcgccaacatccaggccagccacgaacgtgacttcgccgccttcggcgtggccttcgaccactacgactcgaccaactcggcggccaacaaggcactgaccgagcagttctacctgaagctggaagcggccggccacatcagccgccgttcggtcgcccagttctacgacccggccaagggcatgttcctgcccgaccgctacgtcaagggcatctgcccgaactgcggcagccccgaccagtacggcgacaactgcgaagtctgcggcgcgacctatgcaccgaccgacctgaaggagccgcgttcggtcatctccggcgccacgccggaaatgcgcgattcggagcacttcttcttcgaggtgggccacttcgatgcattcctgcgcgaatggctggccggcgatgtcgccctgccgggcgtgaaggccaagctgggtgagtggctcaacgccgaaggtggcctgcgcgcgtgggacatctcgcgcgatgcgccgtacttcggtttccagattcccggccagccgggcaagtacttctatgtctggctggatgcgccgatcggctacctgtccagcttccagaccctgtgcggcaagctcggcgaagacttcgaagcgcacctgcgcgccggcaccgccaccgaactgcaccacttcatcggcaaggacatcgtcaacttccacggcctgttctggccggcggtgctgcacggtaccggccaccgcgcgccgacccgcctgcacgtcaacggctacctgaccgtggacggtgccaagatgagcaaatcgcgcggcaccttcgtgatggcgcgtaccttcctcgatgccggcctggagccggaagcgctgcgctactactacgccgccaagtccggcggtggcgtcgacgatcttgacctgaacctgggtgatttcatcgcccgcgtcaacgccgacctggtcggcaagttcgtcaacctggccagccgctgcgccggcttcatcagcaagcgcttcgacggccagctggccgcgcagctgcccgacgcggcgcagtaccagcgcttcgtcgacggcctggcgccgatccgcgaagcctacgagcgcaacgacccggctgcggcgatccgcctgaccatgaccctggccgacgaagccaaccgctacatcgacgacgtcaagccgtgggtcatcgccaagcaggaaggcgccgacgcgcagctgcaggccgtgtgcagccagggcctgaacctgttccgcgtgctggtcaccgcactgaagccggtgctgccggccaccgccgcgcaggccgaggccttcctggccgcgccggtcaatgactggaccgaactggcacagccgctgctgggccaccgcatcaccgactacaccccgctgttcacccgtatcgacccgaagaagattgacgccatgatcgacgcctccaaggacaccctgcagccggccgccgctgccgcccccgccgccaggaccgacgccgccaagccggccacaccggccccggccaaggacgacgcgaagagcgccgatgctccggcctatatcggcatcgacgatttcgccaagctcgacctgcgcatcggcaaggtgctggtgtgcgagttcgtggaaggttcggacaagctgctgcgcttcgaactggatgccggcgaactgggcaagcgccagatcttctccggcatccgtggcagctacggcgagccggaagccctggtcggtcgcagcgtggtgttcatcgccaacctggccccgcgcaagatgcgcttcggcctgagcgaaggcatgatcctgtcggccggtttcgacggcggcgcgctggcgctgctggacgccgacagcggcgcgcagccgggcatgccggtccgctgatgcctgcagcgggcgcggccaccgccgcgcctgccggcagcatcggccagcggaggcaacgcgatggtaagcaatggaatggaactggcgctgttcgacttcgaccacaccgtgaccacctgcgatacctatggccgtttcctgcgccgcgtggccaccgccgaacagctggcgcaggcgtggtggaaggtcggcccgtggctggccgcatacaagctgaaactgatctcggccgaacgcatccgtgcacgcgtcacccgcctgaccttcagcaaccgccacagcgatgacatcgccacgctggccgcaggcttctcgcgtgagttcctgcccgaggtggtgcgcccggaaatgctggagcagatccgctggcacagggaacagcagcataccgtggtgatcgtgtccggctcgctggacctgtacctgcggccatggtgcgagcagctgggcctgcagctgatctgcaaccggctggaaagccaggacggccgcctgaccggtcgctatgccggtggcgactgcggcccgcgcaaggtcgagcacatccgtcgccagttcgatctgtcgcgctacgtgcgcatccatgcctacggtgacagttccgaagacaagccgatgctggcgctggcccacgagcgctggttccgtggcaaacccctgaagtaaccccgacgcgcagccttcgccacgcatgagcctgatcccgcccctgaccgaacgcctcgaccgcctgctgccgcagacccaatgcgggcagtgcggctacgacggctgccgcccgtatgcgcaggcgatggcgcgcggcgaggtgggcgtggaccgctgcccgccgggcggcgatgccggcgcgcgcgcgctggcgcaggtactgggcgtgcctgccattccgtttgatcgttcgcgtggcgaacacaaggtgccgcaggtggcgctgatcgtggaagccgactgcatcggctgcaccaagtgcatccaggcctgcccggtggacgccatcgtcggcggcgccaagtacatgcacacggtcatcgccgatctgtgcaccggttgcgaactgtgcattccgccgtgcccggtggactgcatcgagttgctgcccctgtaacaggggtcggatccctttccgcgggaaagggatccgaccccatcccgcagttatggcacggccgccgtcaccacgatctcgaccttccactcggcgtgggccagcttggcttcgaaggttgcgcgggccggggtcgcgccctcgaccacccactcgtcccacgccttgttcatgccgtcgaagtcggcgatatcggccaggaacacttccgcgcgcagcacgtgctggcgatcactggcgaccagtgccagcagcttgtcgatctccgccagcacctgccgggtctgcccggtgatgtcctggctggtgtcttccggaatctggccggagaggtaggcgaccttgttgtacacggtcatttcggacatgcgcggtccgacgtcgtaacgctccatcatgggcgtggctcctgcgggtgatcaggcctgcattgtcctccaatccggtcgacggtgggtgcacgggcaccttccgcgacacgtcactaccgggctccgacggtcccactggtcaaatgacgatgacaggcgcacgatgcgccacgcccgcgttgacaccgccctcgcccctcctgccgcacccttgcgccgatgaccgtccccgtcgattccaccactgccccttccacgccagcctggaagcgggttgccaccatcgtcatcccgctgctgatcctcgccctggccctgcacggcctggccaacgagttcgacgagcacggctaccgggccatccgccaggcgttccgccagctcagtggcatgcagatcgcgctcaccgtggtactcggcctggccagttacgcctgcctgatcggcttcgatgccatcggcctgcgtcgcagcggcatccgcgtgcaccctgcgcgagtcggcatcaccgcgttccttgcgcacacgctgggccagaccgtgggctttgccgcgttgaccggcggcgcggtacgcctgcgtggctaccgcagcgccggcctggacctggcacagatcggccaggtggtgctgatgagcacgctcggcttcgtgttcggggcatggctgctgatcagcgtggcactgtgcatggaacctgcagcggcagcgttggcattgccattgaatcccgatgccgtgcgcatcgtcggcatcgtcgccctgctcgcatatctcggcaccgtgctgctggtcggccgcgatggacggcagttcagcgtgttcggccatgcgttgtggctgcccgaccgccgcaccatgatcggcgtcaccgtgctgagcgtgatcgaactggtgctggccagtgccgcgttctacgtgctgctgccggactccacgccgaccggactgcccggcttcgtcggcctgtacctggtggccgtgctggccggcttggtctcgaccgtgcccgccggccttggcgtgttcgagtggagcctgctgaagctgttgccgcaggtggcaccggcggcggtgctggcagcggcgctgatctaccgcgtcacctactacgtgctgccgctggtgctggccaccctgctcgcgctcgcgcccgccctgcgccaaccgctgcaggccagcgccggggcaacccgtgcgggctggaacgcgctgcgcccgtggctgccgcagatcatcgcgctggcggtgttcagcatcggcgccgcactggtcatcgacggcacgctgccgacgccacgccgtcacctggtcaatgcctcgctgccgatcctggagacctcgcacctgatcggcagcctcagcggcgtcgcactgctgctgatcggccagggcctggcccggcgcagccacgccgcgtgggtgctggcgatggcggtgtgcgtgatcaccccgctgccgctgtggctgcggggtggccaactgttgatcgccgtctcggcagtgctggtggcgatggcactgtgggccgcacgtcgcgagttctaccgccagggcgcgctgctggacgaagcctggtcatggccgtggctgcgcaacctcggcctggtgctggtcgcggtcacctggctgctgttcttcacctacagccatgtcgagtaccagaacgagctgtggtggcagtttgcgatatccggcaacgcaccacgcgcgctgcgcgcgttgctggtcgtggcgatcgcgctggtgatgttcggcctggcgcggctgctgcacagcacgcgcagcccgctgccagccgccgacgaggccacgctgcaatcactggcgccggtactggccggtgccaccgatacccaggcctgcctggtgctgaccgccgacaaggcggtgctgcgcgacgaggcgaaacagggcttcgtgatgatgcagcgctacggcggttcgctgatcgcgatgggcgatccggtcggcccgccggaggtcgcccgcgcattgatctggcgcttccgcgaggaagccgaccggctcggcctgcgcccggtgttctaccaggtcggcgagtcctactggcagacctacctcgacctgggcctgggcctggtcaagctgggcgaagaagcgatggtgccgctgcacgatttcggcctggaaggccgcgaacgtgcggacctgcgccaggcctggaaccggggcaagcgcggcggcctgtccttccgtgtggcaccggtggaggaaattcccagcctgctgccgcgcctgcacgcgatttccaacgcgtggctggaagacaaggccggcgacgaaaagggcttttcgctgggcagctacgacccggattacctggtgcggttcccggtggcactggtggaggccgaaggccagatcgtggcgtttgccaacctgtggcaggcaccggccggtgccgagctgtcggtggacctgatgcgccacgtcaacgaggcgccgaaggggacgatggacttcctcttcatcgaactgttcctgtgggggcgcgcgcagggctatgcacgcttctcgctgggcatggcgccactgtccgggctggcacagcatcgcctggccggccgctggaaccgcctggccggcctgctggcgcggcatggcgaacgcttctacggcttcagtggcctgcgccgcttcaagtcgaagttcgacccgcagtggcggccacgctatctcgctgcgccgggcggcatgcacctgccggccgcactgctggatgccacgcgcctgatctcgctggacccgcggcgcaactgaagccccgtaccaccaggcatacccggcgccacctgccgcccggtaggtgtcgaccttggtcgacacgctcatccccaaggcgccctcagccccagcgccgaccaaggtcggcgtctaccaagcgctacataccgcccttgaggatcacctcggccagccgatcatagtcaccaccgaaatggtggtcacccggcagcttcaccttcttcacaccgtcattggccggcaggtccgggcacagtgcgtcctcatccttgtcgccgtacacgcacagcgttttctccgccggcagtctggccacttccggcgcgatcggcaggccgtcgccgccgccgcccagccagttgctgacgtggaactcgaagtcggccttcttgcctaccgacagcagcacgatgcgatccagcgctgcacgggtatcggcatcgagctggttgatggtcgccggcagcacgtcggccccctgcgagaaaccgatcagcatcaccttgtcgcggtgccactgctggcggtagtgatcgatgatcttctgcaggtcagcagcgaagcccttcggcgtgcgctcgctccagaagtagcgcagcgagtcgatgccgaccacggccacgccgtgctcgttgagcgacgacgccacgtccttgtccaggccggcccagccaccatcaccggagacgaacacggccagcgtgtcgccgttgccggtcgacggtacttccaccaccggcaggcccttcagcgcggccggcggcggtgccaggctgacgcctgcctgcgcacccatcacccgcgctgcagccaccaggcccggtgaggcatcaccacgcgccgtgcgcttgaactcgcgcgccatcgccacctgctgcacgaaaccgctggcctcgcccgccttgcagccgtgatcaccggctgcactcaaccacgggaagttcagttcggcgggttgcagcgtgttgcgcttcacgccatcgccgcagaccatgcgctcgtggttgtggtccgggcagaaaccagtggtgagcaggccggcgaacacctgcgtatcggcctgcgcagccagcgcataggccatttcagcgccttcgccatcgccgccgaccagcggcaggtggtacccgggcagatgcagcgaggcctgcagccagcgcgagaaattctcgacatcgccggaaccgaacgaacaggtcgggttgccttcgcgcttgagcacgccgcgcaggtgcgcgatgtccacggcggcgaccatcgcaccgtcggcacgcagggcctcgatcggcagacggctggtatcgccaccgggagtcggttcgtggaaccagatcaccacccgctgcggggtaccggccggcatatgcaccggaatctgttcgaaccgcccgtggctgaactgctgcacggtcgctgccgcggttgccggcagtgcggccagcgccagcaccacgcccattaccctgcccagccctgcacgcttcatatcgcagccccgatggaatgcgcacacgatacgctgcctccacgtgcacggcacgtaccggtgcaggccgttggggtttcagcaggctgcggcgcgacgactgcgccgatacagcgccagcgccagatacagcagccagcccacgatcaccacgatcaccactttctgccccagcccgcgcggcggcccgccacgccacagcacgtgcagccacagcagcacgaaggccagccaggcccagccccagagcaggccggcggcggattgccagcccggttcgcggcgcaggtaccaggcctgcagcagcatgccgacgctggcacacaggaacgcagtgttggccgccaacccgtggatgaacggtgccagcagcggggttgcttcgggcagccagctgtcaccgatggcgaccgtggccaggcccagcgccgagaccgtgaacagcagcggcgccgccgcgctgcgccgcgggccgatgctgccgcggtaaagggcgatgccgagcagggtgatcgccagtgccagcaggcagtacgccgcacgcaacgccagcccccacggcccgtgcagatagaggctgagcgtggcccgcacccagtccaggtcggtgcgtgcgaactgggtccacagcgcggtaaccaggaacagaaccagggcggccagcgccagcagcgccgccggacgcgcgcggctcatgcggaggcttccgggtgccgcgcctgccattcggccaacgccttgcgatagcgctgcagctcgtcggcatacaggtccagcacgcacagcgggcaaccgctgccacagcattcgttgggaccgggctcttccggcggcagcggacggggatcgggatcagggacggacacggttggaagcggcaatcggtggaaacgggccccagtgtagcgggcttgctcagcgccccagctgccgccgcaggttgtcgcgcgcggccgcgtcgaggcgctggtggaagaactcgctgaggaagatgcgcggtgcgcgcagcaggccctgcaggaaacggcggcggccagcgcgatacaggaagcccggcaccacgcccttgtactcttcggccacgccccggtcataggcggtgaacaccggttccggcgcggccaggatcgccatgtcgcagtccaggaacagcgcggcctcggcatcgacatcgtccgggccgagcgcgccatggcgggcggtcagcaggatcagctgctcgacccgggcggcatcgacagcggcgagttccggcgcctgcgtgatcgcctgcagggccatctgcgccgaacgtgcttcgttgtcctttcgccccgccacgtagatcgcatcgtggtagagcacggccaggtagacctcggccggctgctgccagccggggccgtcggcaacctcctggcagtgctgcagcaccgcgcgcacgtggccgaagtgatggtaggcgcgtggtggcgttgcatagctgtcctgcagcgcctgccactgcgccggagcgagcgtcagcggggaaaagtccatgcccggatcatcccgcctgcgcggttgacgggcaagctgtcgcttttttcaccacgtcctcacaacgcccttcgcactaggccgcaacgcggttgtccacagctttcccgagcgctggtccacaccggttgtggatgaacgtgcggaccgaccaacggtcgctgcagcggtgcgcgcacaggtctacactcgcctcaggcgggagcgcccgccgctgccgggagccgtcatgtaccgtcctgccgcccgattcgttctgctcgcactggccgcattggcagcgccgtccgcgatcgcacaggatcatccgggaacggccgcgccgctggccgttgccagcaccaccactccggcgatgccgacgccgcagcaggtgttcgcgattccaccggcgatgcgcgacatgctgcgcacgcaggtgatcaatcacggttactcccgcgagcagcgcctgcaggcgctggtggagatgatcttcgaccgccacggcctggacctgcagtacgacgccgatgcgaccttcaccgtcagcgagatctggcagcagcggcgcgccaactgcctggcctttaccctgatgttcgtcgcgctggcacgcgaagccggcatcaaggcacgcgtgcaggaagtcggccaggtcgtgtcgtggtaccaggaccaggcccagggcctggtctacagcgtcggccacgtcaatgccggggtcggcttcgccggccgcttcgccaccgtcgatctggatcgcaacgtgctgtacgaccgccgcgggccgctgccgatcagccaggcacgggcattggcacacttctacaacaaccgcggcgccgaacgcatggccagcggcgatctggtgggtgcacgcaccttcttcaatgccgcgctggcacaggacaacagcttcgccgccacctggaacaacctgggcgtgctggaaaaccgtacgggcgataccgccgccgcgcgccgggcattggaaacggcgctgcgactggacggccgccaggacgctgcactgaccaacgccagcgcgctgtaccggaagctgggcatggtcatgcaggcgcaggcgctggagcagcgcctgcagtcggtgcagcgcgaggatccgttcgcgcagtacatgctcggcgccgaggccgaacgcgccggccgactggatcaggcgatccgctattaccggcaggccgtgcgcctgtacgacaccgcacaccagttccacttcgggctggcgcgggcctatttcctggccggccagctcaggcgcgccgatcgtgaactgctgcgcgcgcaggcgctgggcggtgccccgcagcaggcgcgctaccaggccaagctggacagcctggcccgctggcgcgcacagcagcaggccaggcgctgaaggccggtcaggccttcttgaggaagcaggtcttcaggaccaggcccttgatcttgtccgagttgccttcgatgtgctcggcatcgtcctcgaccaggcggatgttgcggatcacggtgccctgcttgagcgggatcgaggaacccttcaccttcaggtccttgatcacggtgacggtgtcaccggcctgcagggtattgccgttgctgtcacgcacgaccagggtcgaaccggcactttcctcggcggtccattcgaagccgcagtcggcgcagatccacagcgcgccatcggcataggtgttttccagggtgcactgcgggcaggcgggggcagaagacatcagcaagtacctcaaagtgaatcaacagccgccattgtaaccgcccggctcgcctgcccttttccgggcggcgcccggctcccggcttgacccgatccggcctcccgatacggaatgggaggccgcaggaacttgcagtcggcggcgaactgcagcagagtgcgcggcccctgatcgcccccggaactccccatgcgcctcggcatcgacttcggtaccagcaactccgccgccgccatcgtgcatgagggaacactgctgccgatccgcttcggcgacgccgagcagttccgcaccagtgtgtacttccccggcgtggtgcccgacccggacgacttccagctcgacgacggccaggaacaccagctgcagcagatgatcgacagcgccgcgcgcgcggcgcgtgccgccggccaggaacgcgcgccgcaggcgctgcgccgcgaagtcctgcgcgcgctgcgccgggaatggatggaagcccgcgccggcaaggaacgcagcgccaacgacctgctgcagaacgcggtctacggcgacgaagcgctggaagcctatttcgaggaacacgaaggcaacctggtgcagagcccgaagtcgatgctcggctacaacctgcacccgcgcgcgaagcagaccatcaccggcatcgccgcgcacatcctcgaacacatccgcctgaccgccagtgcccagctcggccggccgctgcgcgccgccctgctcgggcgcccggtgcagttccgcagttcgatcggcgcagccggcaacgaccaggcgctggacatcctgcgtgaagcggccacccaggccggcttcgaccaggttgatttcctcgaggagccagccgcggcggccatgcattaccacgccgaaagccgcgagcggcaccaggcggtaatcgtcgatatcggcggcggcaccaccgacatcgcccatgccgaagtcggcggcgacgacgccccgcgcatccaccgcgcctggggtatcgcccgcggcggtaccgacatcgacctggcgctgagcctgtccagctacatgccgctgttcggccgcggcatcacccgcgtgccggcccaccactacgtggaagcggccaccgtgcaggacatgacccgccagcgcgaattccgcctgcacaagtacgaccatgtcgacgcgccctggggcgaccgcctgcaggccctgcaggacaccggcaacaccgcccgcctgtaccgtgacgtcgaacgcgccaagatcgccctcagcgctgccagcgagcaccgcagcacgctggactacatcgcccgcgacctgcatgccgacagcagcgccgacggcctggccgccgccgcccatggctacctggagcagatccgcgagctgctggcccaggtccgcagcgacatcggcggcgacccggatgccgtgttcctgaccggtggcatgtcccgcgccggctacctgcgccaggcggtggcggccgccttcccgggcgcccgcatggtccacggcgagccctcgctgggcgtggtccagggccttgcgctggcggcagccagccaggattaacaaaacgttacgcggtctaagttactcttggtcggctagaaccctgctgccccttccaccggccatgccggtgtgtgtccacggtgcagcctggcccgcccagcgggcctagcggccatgccttcctggctcgttcatggtccgcgcagcacctgagccgccattgagacccgctttgggcacccgccaggcccctgaggccttacaacctgacgcagcacctgcacccatcgactgccgccgttgtgacgcggactgttgccggttgcccgtgctgctgcagcccggcgaccacgtgcccggccagttcctgtcacgcgacacccacggccgtgccgtgatggcgcgcaacgaggaaggctggtgcgcggcgatcgatccctatcacctgcgctgcacgatctattcgcagcgcccggcgatctgccgccagttctcgatgggcggcgatgactgccgccgcgagcggcaggactacctgcgccaggccgatgcctgggcgctttcctccccttccacctgacaggagcaaccatgccccgcaaggcaaagacccccgcgaaggccagcaacagcatccgcagcgaacgcaagggcgcggccgccagcaccgtggtcagcagcgattcgatcgcttcggacctggcagcgttccgcaaggccggtggcaagatcgaagtcctcggcactacctgggcgctgaagaaagccagctgacccagctccgaccgcggcggcgctgccgccgcggcctgccggaccgcgctcagcgatccaggcgtacccgcacactgcccgaatgcgactggatgcggatgtcaccgtcgccattgccgagccgagtatcgagatggctgcccgggccgtagcgcggccgttccacctggccggcgtcgctgttgatcgacccgctgaagctgttcaccgacagctgcgccgaaaccgtgcgtggcaggcgcaggttgaccgacgcgctcaccgattcgacattgatacggccccccggcgccagcccggccgccgacaggtcgatgctgcccgacacggtttccaccgccagccgctgcacccgcccggcatcgacctcgacccggccggataccgtctgtgcaccgatgtcaccggacacgccgccgccggcttcgatgcggccactgaccgtgttcacgtccagcttcggcgtctgcaggcgcgcgatgacaccgccgctgaccgtattgagcttgctgtcgccgctgcgaccggaggcgctcaggctgccgctgaccgtgtcggcctgcaggcggcgcacatcgatgccgctgatgtcctggctggcactgaccgtactcagcagcagttccaccgagcgcggcacgttcagcaccagcgtcgcgccgccgttgttgttgcgacgcggatactcgatctcccagcgcacgcggttggcactcttctcctggcgcagctgcaggccatcgcttagcgtaccggtgagctgcacgtcgttgcggtcccagccacgcacgctcactttgccggccacgttgctcagttcgatgcggccgccggcggccaggttgtggcgctcgtcgatccgggtgtcagccagggccaccgcgggcagcagcaacagcgcggcgcagcaggtcatcagggttcgtgtcatcgggggtctcctcaggtcgtcaggccggactcggcggcataggccgcctgccgggtcaattccagccgcaacgcataggtgcgcttgagctggccaagcagatgcggcgcgcgtggatcctgcgccagcgcggcccggatctgtgccgcgctttcatcgagttcgtgcagcgccggctgccattccggcgcccggcctgcgggcaacgaggccactgcctgctggtactgctcggtcatcgccgcggcctgcagttgcagggtagacggcaccggcgcgtccggttgcgcatggcgccacggcgccaccgcgtagagcgccaggcttgcggccagtgcggcccccaccggcaaccaccagcgcctgcgcgaacgccccggcagcaccaccacgttgccggtcggcgcaggcgccgcctgtggttcacgcggcggcagctgcgccgacaaccgcgtccagccatcggcgggcaggccgcgttcggaaggcagcgcgcgcagtcgggccaccagatcgtggtcggaatcgtgttcgtgtgtactcatgtcatgtctcccagccgtgcgcgcaacaggccgcgcgcacgatgcaactgtgccttggagctgccgacggccatctgcagctgcgcggcgatctcctggtgtttccagccctcgatgtcatgcagcaccagtaccgcgcgcgccctcggcggcagcgtcgccagcgcgcgctccaggtcgcgctcggtaccggcgcagcggtcgtgtacggccagctcctgcagtcctccgtccacatcatcaagactgtcgtggtcctgcacggcggcgcgcccacgcagttccatcagcgcagcgttgacgcccaggcgatgcagccaggtcgacaggctgctctcgaaacggaaccccggcagcgccttccacgcctgcaggaaggcttcctgcaaggcgtcttcggcacgcgcctgctggcccccgcacagccgccacagcacggcgaacacgcgcggtgcatgccgccggtacagcagttcataggccgaggtatcgccggcggcggccgcccgcaccagggcgggttcatcgacggcgtcgtgggcggcaggcggcgcgggcatggtggtgtcgagcatatcgcttggatgcggcggcccgggaaaaggtttagagccggacgacgatcactgccgtgcaaccttttcgacacctgctgcatccatggaaggtccttcgcgaaattgccgtccaggagtcctgccatgtccagcccaacctgcgccgccctgctggtgatcgccgcctgcgtcgtgctgcaggcactgggcctgtcgctgcagctgcaccccggtaacggccgtgcctgcctgcaacagcaccgccaggcgctggtgtgcctggcctgggccccggcggtcgaatccccggcacgcgccgggtaacatcgaaggtcgttattgccacctgttgtcgccccatgatgttgtcgctgaaggatcacctgccgccctggacccacccgtggttgaactacgccggcgtcgccctgcagatcgtaggggtgcttctggtcgcgtggctcctgcgcgtgctcgcccggcgcctgatccgccgcttcgccgagcactacacgctgccgcccgagatggtgatgggcgcgcgccggatcaccagtttcgtggtctatttcagtgccctgctgtacatcctcagcctgctcggcgcgaagccctcggtgctgtggaccgcgttcaccggcttcgcggccgtgggcgcggtggccttcttcgcggcctggagcgtgctgtccaacatcttctgcacgctgctgatcttcaccacccgcccgttccgcctgcacgactacatcgaggtgctggagaacggcgagaagccgggcctgaagggccgggtgatcgacgtgaacctgatctacaccacgctgcaggagaccggcgagggccacgagggcacggtgctgcagctgccgaacaacctgttcttccagcgcacggtacggcgctggcgtgacccggcgcaggcccccggcggcatccagggcgacggttgagggtggagttttcggcagggctgcgccctgcacctgcagaggccgaagccgaagccgaagccgaagcaagatcaagagcggcattccgtgggatggcgggggggtgtgggtggtcaggacacgccgtaaacccccctccggggtccggcccagccgctggcggctgtgcgttcgggcgcttgcgaagcagtgcttcgcaagcaaagcgccctcacccctgggggctcgatggcgccatccatggcgccaacggtcctgcccacccacaccgccccacctctgacagattccgcgcgctgttggtgggtgccgaccgttggtcggcacatctgtcagatatcgatagtcaaaattggatccgaccccgtgccgaccaacggtcggcacccaccatcagcagcaggttccaacagatcgcggaaatctgtcgaaggcggggtgggtccggttgaggggggccagatcagtgagcgccatggatggcgcctttgatgttgacgttgcttctgcaggtgcagggcgcagccctgcaataaaacacccctttacctcagctggctgtccttgctgccacgccggttgtacccggcatgcgcctggtcttcgtcgtcccgcgcctgctggcacgcaacgcacaaccgcacaccaggcacagcctggcgccgcgccaacgggatcggcgcgtcgcattcctcacagtgttccagaccgggtccctcgcgcagctggcgccgcgcgcgggcgatcgcatcatcgacagtggcgtcgatctggtcctggaccgcgccgtctcctgcccaaccggtggccatggctatcctccgcaggtgtgtcgcccgatatggggacgatacaccccggcaaaaaggaaggccttcatgtagagccgagccatgctcggctgctcttcaggatgccaaacagaacgccgacggatccgatcaggccgattgcggcttaatcccctccgtcccctttttgcttaccagaccaggtcgtcgggcacctggaactgcgcgtaataggcgtcgtcttctgcgttgccggtggagatctcggcggtcgagcccggctggccgtggtcgacgatgattgcttcgggtgcgcgttcacgcaccttttcggcggcggcgcggggcagcaacgcatagccctcgccgtgggcaacgatgaccagcacgcctaccgacagcgccttgcgcagcttggggtcgatcagcagggtacggatcgccgcgccatcgctgaagcggtactcgtcgtcgcccttatggggtacggcatgggccgtgatgatctgcctggcctgggccttctgttcagcctgcctggcctgggcattgcgttcggcggccagtgcgcggtcgcgctcgaccttctcggcgcgggcacgttcagcctcgcgctggacctcggccgaggtcgattcggccttgccctggcgggccttggcctgctcgcgtgcggcggcgctggcctgcgacttcttggccaggccggccttgagcaattgttcctgcagcgcgttgggctttgccatggtcggtgcgtaccgcgtgtaatcttggatgccccattctaccgacgccccgccggccctgcatggcagtcctgaagtacctcaccggttatcccgaacccctggttgcccaggtcagcgagctgctggcgcagggcaggctcggcccctggctgcagcagcgctaccccgacccgcacgaggtgcgcagcgaccgccagctgtacgactacacccaggagctgaaggaccgttacctgcgcaagtcggtgccgctcaacaaggtctgctacgacaatacgctggaagtgatcaagcacgcgctgggcacccacaccgccatctcccgcgtgcacggcggccgcctcaaggccagccgcgagatccgcatcgcgaccgtgttccgccaggcacccgcggcgttcctgcgcatgatcgtggtgcatgagctggcccacctgaaggaagccgaccacaacaaggccttctaccagctgtgccagcacatggagccggactacctgcagctggagttcgatacccgcctgtacctgaccgagctggccaaccgcggccagcgctgaccggccgcagcagctacactgcgcgccccctgcccgacctgcctgccatggaaccgatccgtctcgacaaacgcctgtccgccctgctcggcatcccgcgcggcgaagcgcggcgctacatcgaaggcggctgggtcacggtcaacggcgacgtggtggaacagccgcagcgcccggtcgatggcagcgcggtgatcgtggtggccgaacaggccagcgatgaaaaggccgagcgggtcagcatgctgctgcacaagccggccggtgtcgccgccgaaaccctgtgtgccctggtcagcagtgacagccgcagcgaacttgatgccagcgacatccgtccgttgcagcgtcacttccacggcctgcagctggccgcctcgctgccggccagcgacagcgggctggtggtggtcagccaggatccggccacgctggcccacctgcagcgcaacctgggccgtaccgagcaggaatacctgatcgaagtggccgaaggcggtcccgagcgcgggccgtggctgatggcgcggctgcagcaggaatcgggcggcgccaaggtcagctggcagagcgagcagcgcctgcgcttcgccggcaagggcctgacggccaaggggctgcgtgtggcggtcagcgccgccggcctggaggtcacggccgtgcgccgcctgcgtatcggacgcgtggcgctggggccgctgccgccggggcagtggcgctacctgggcagcgacgagcggttctgaggtgtgcgggtcagggccctttcccgtggagagggatccgggggtcggatcccgtgccgaaggcaggggctctgaccccctgtcgatcctgcaggcattccttcacgcatggcgtggctctaccatcggggcatgagcctgcccaagccgctgtggcgacgcctgctgcgtgttgctgcgatcatcctcgccgtgctggtgctgctggtcctgtccgggctgctgctggccgaccatctcacgccgcaggtgcatggcgcgccttcgcacgtgctgccgctgcagccggcacagacccgcatcgaccagcagatcgtgccgctgcaggcggcccatcccggccagtcgggcgtggccttcctcagcgatggcatggatgccttcgccgcccgcgcgatgattaccacccaggccggccgcagcctggacctgcagtactacatctggcacgacgacctgatcggccacctgatggccaaggcgctgtacgacgccgccgagcgcggcgtgcgcgtgcgcatcctgctcgatgacatgaatgccaaggacaaggacgcgctgatgatggcgctcgatgcccatccgaacatcgagatccgcctgtacaacccgttccgcaaccggaccggcatcctgcgcatggtggagatggtgcagcgcttcttcagcgtgaaccaccgcatgcacaacaagagctggatcgccgatggccgcgtcgcgatcgtcggtggccgcaacatcggcgaggagtacttcagcgcgcgcaccgacgtgaacttccaggatctggacctgctggtcgccggccccgccgtggagcaggccaaccggatcttcgacgactactggaacagcgaaaccgccatcccggtatccgcgcttgccttccataccgacgcacaactgcgcctgctggtgcgcgaatcggaccacgaggcgcagcgggacgtggcccgcccctaccttgcgcgcgtggccgaatcacgccagcggcagcgcccgagccccgagccgttgcactggagcggtgccgtgcgcatcgtgtcggacccgccgatgaagcaccgcagggatgatcgcgccacctggctggtgtcgaccctgatcagcgagctgcaggccgcccggcacaaggccctgttgatctcgccctacttcgtgcccggcaacgagggcctcgatggcttttcggcaatggccgggcggggcgtgcaggtgggcgtggtcaccaactcgctggccgccaacgacgtcgccgccgtgcacgggggctacatgggctaccgcgtgccactgctggaagccggcgtccacctgtacgagctgaaggcacagggtcagtcgggcgatgccggcgtgttcggcagcagcggcgcgagcctgcacaccaaggcattcctgatcgatgaccgccgcggtttcgtcggctccttcaacctggacccgcgctcggcctacctgaacactgaaatgggtgtgctgttcgacgatccggtgctgggtacacagctgcgggacgaatacctgcgcctggctgaccccaggcacagctggtggctggcactggacgaccgccgccggttgcgctggctggagcgcgaaccgccaccgcactgggtggaggccgagccaggggcaacggcgcgcaagcgctggttgtcgcgggtgatcagctggctgccggtggaatcgcagctgtagcgctcaggacgccggagcggcctcatcctgtccggcctcatccagcgtttccacgttgcgcccatgcaggcgccgccagatccagcgcaatgcatgcggcggtgccgaaggcagctgctccagcagggccagcatgcggctctggctggcatgcccatggcggcacaacaggctggccgctgcggccgcgctggccaggcgcaggctgtcggccaacggtccttccgcatccaccgccaaggcctggtgaaccggctcaggcaactcccatgcggcagcgacccgctgcgccagcggcaacgaccactgctgcaacagctgcagggccaacgccggctccacgggctcgccacgggcctgtgcctcctgcagcagctggcgcatcaccagcgccgcacccagcccctgcaccaggcccagccactgcgcggcgaaggcatcgccgaaggtgaccgtgcgtgcgtggtcggccgctgcacgcgatgccagcagtgcgtgctcccagatgatcgcgctgaactgcgggaacacctcgcattgcacctgcatcaccggctgcaccagtaccgcactgatgatctggcgcacgccctcggtgccgaccagggtcaccgcccgctgcaggctctctaccgggcgctcgtggaccttgtaggccgggctgttggcgatgcgcagcaggttgccggtcagcaccgggtcctggccgatgatcgcggccatcacccgggccgaggcggcatcgtcgttgacggtctggatcagctgcggcagcagctgcggccggcggggcagctgcctggccgcccagtcgcggtcctgcagcgcgcgcgccaccgcctcgcccaggcctgggtcctgcaccggcgttggctcgccggccagccgtgggtacaacgcaagcgcatgcagcccgcgttgcaggtgagcggcgatctccggcgacggcagcgcctcgccctgcaggcttgcggctgcggcggccaccgcctggcgggatgcggcaaccagccgcgccggtgccgccccggtcgaacgtgtcagccagccgcgcagcgatcgccaccatgccgctgtcatcgccgcccgccctgtcgttgtgatgcccttgccgtcactgaccgccctgcctcttcacgcccatccggccacccgccgtcgtcgcagcatcggccgcactttcatcttctttaaccggacggccgccgacgtcgacggcaacggccgggcgaatggactagaatggcgccgcgcgacccgtcccccagccatgacgacgtcgctttttttgttttgggaccctaccgttcactggccgttcgctgcagttcgccgctgttcgcgccatcggagacgccatgctattcgaaaccctcgccaccaccggccacgaacaagtggtgttctgccacaaccacgatgccggcctgaaggcgatcatcgccattcacaacaccaccctgggcccggccctgggcggcgtgcgcatgcgcccctacgccagcaccgacgaggcactggccgacgtgctgcggctgagccggacgatgacctacaagaatgcgctggccggcctcaacgtcggtggcggcaaggcggtgatcatcggcgacccgaaggtggacaagaccgaggtgctgttccgcgccttcggccgttacgtcgactcgctgggcggccgctacatcaccgccgaagacgtcggcaccgacgtcaacgacatggagaacatctacctggagagccagttcgtgaccggcgtgcaccaggtccatggcggctccggcgatccggccccgttcaccgcctacggtgcgctgcaggcgctgatggcggcgatgcgcttcaagttcggccacgaggaagtgggcaagaccagcatcgcggtgcagggcctgggccacatcggcatggagctggtgaaactgctgcgcgaccgcggtgccaagctgtatgtcaccgacctggacagcgcactggttgatcgcgcggtcagcgatttcggcgccgaagcggtcaagcccgacgagatccacgaagtgaacgccgacgtgttcgcaccgtgcgcgctggaaggcgccatcaacgccgacaccctgccgcggatcaaggccaagatcatctgcggtaccgccaacaaccagctgtcgagcctggaaatcggcgatgaactgcacgcgcgcggcatcctgtatgcgccggactatgcggtcaacgctggcggcgtgatgaacgtgtcgctggagatcgatggctacaaccgcgaacgcgcgatgcgcctgatccgcagcatctatcacaacctcacccgcatcttcgaactgtcgcagcgcgagaacatcgcgccgcagcgtgcggccgaccgcatcgccgaaagccgcatcctgtcgatcggcaagctgaagatgccgctgggccgcagcaccccgcgcctgggcaacctgcgcggcggctgagcctgccgatgtcgcgccggagctgacgtcccggcgcgacctcccgctcagaacccggtgctgtagcgcagcgccgcctggcgcgcgccctcgccaccgacgcgctggtcgaagcccaggctcaggcggccattgcggccccaccacgactccagcgccacgccgaacagcgcactgccacgcggtgcgtcccatcccgccaggggtgcccaggcatcgacaccaacgaagctggcctgccagtccgcatcggcaccgtcgagccgttgctgccactcggcgtgcccgcgcagcgtccagcgcccccagccgcgctcgccacggataccggccagcatctggctgcgctgcacgcggttggcgtcgccacgcaggccgaagccgaaaccacccagctcattgaaggcatcggtatccacgcgcgtggtgctggcacccagatacggtgtcaacgacgcgcccgcgcggccaaaacgatagccgccttcgacgctggcactgctgaagcgtccgccgtaacgtgcggaaacaccataggcaccggcgcccagcagcaactggcgatccagcgcacgggtgaactggccgctgccgacctgcgccagcgcatagccccggcccaggttccaaccggcgtacaactgtgcctgcgcctggcgatcacgcccacgatcgccgccgaagctgctgccaccattgctgcgggtctcgccaaaggccacgcccatcagcccattgctgcccagcggcaggtcctggccggccatccagccacggctgtcggcggcattgccggcaaaactgccctgcccggcctcaccgagcgcgctctgccaggccccgcgcaggcgcggcgccgcctgcacgcgatcgaagcgctcggcgatcgcacggcgcgacatgtcgatgctgtcgaaggtggccgactcggcccgcgcatgcgcctgcccggacaggctctgcaggctggctgccaggccctcgctgccaccgccggtccactgcagcgcaccggccgccgtgccgaaggccgagccctgcagcgcaggactgccatcgagtgcgctgaacgcaccttccagtcgttgcgccgcggactgcgccgaggccgcgagcccggtcgccgccgccgtcacgctcacctgggtcaggttcaaccaggcagtgttgctgtcatagccatagctgctctgcagcagcgacaggccctgcaggccgctggaggaggccgggctgctgaaggtgccgctcaggccaccggccgcatggaccaggtcctggcggctgccgttctgcggcacgtagccggagacgaagccattcacacgcacgccaccattgatcgaggccgtgccggtcacctgcagcgcattggcaccgagcgcgatcatcaactggccacccgcctgctgcgtgtagttgccctcgatggtgccggtggtgctgccggtggtcaggaacacgctgctgccgttgaccacgttgccgatcacgcgcggcgtgccgccattgaactgcaggccggtcgaatccgggtcgggctggccgaggatggtcacgttggaacggatgacactgccgttctgcagcgacaggatgccgcgttcgatgcgggtggcgccgctgtagctgttgttgcctgcgagcaccagggtgcccccgccctgcttgaccaggccgccgctgccgacgatgtcgttgctccacagcgagccgctcgatggcgcatcgacattggccactacatcaccccagtcgaagcggcccgggcccttgatcgcccgcgagatgtcgagcaggccgtagccgaacaccgcatccacgccgggcgcgccgatgtccttggccgtgcccagcagggtctgccgcaccaggttgttgtcgaagtacgggtagcgctgccagaccagcgcggcggcgccggagatcaacggggcggcgaaggacgtcccgtagttccagtagtaggtgctgccattggcatcgggatagaccgcgctgcccggcgccgccaggcaatagcgcgccgcctgcccgcaggcattggcgtagctggccagcgtgcccggtgcatagggatccactgcggtcgccaccagccaaccgcgctccaggtcggccgccggcagcgagccggcaacgcccagctggctgggcagggcggccaggctgctcggttcggtgcgcgcatcgttgccggccgcgaacaccaccaggccgccatggttgatgacgaacgggcggtactcggccgccacctgcgcggtggtcggcaggtcggtccagtacaggccgccccacgagttgttcatcaccttcacgttgtagctgatcaggtcctggtggacctgcgccacgcccagcggaccgctgaaggaattgcccttgccgctgccgtcatcgaccggcggcttgtcggcgatgatccgcgccgaaacgatctgcgcaccgggggcgatgccgcccggccaggttcccaccggcgcgccggcggccaggctggctaccgccgtgccgtggcccaccacgtcgtccaccagcaggttgttgcgcgccggatcgatgtagttgaggttgcccaccacccgcccgttcaatgccgctgcgttgcgctgcacgcccgagtcgacgatgccgatgcgcacgccctgcccggtcaggccggcggcctgtgcggcacgcgcattggtcactgacaggtgcgcgtcgaaggccggttcctgcggcttggccggaggcggtgccgtcggagggggcgtcgttgggggtgtgggggtggtcggagggggatcgatgcggacattgccgccgcctccgccgccgccacatgccgtcattgccatcgccagcgccgttgccagcgcggacctaaccatcgtcgtgcgttccatcgattccttcccatgaacgttgacctgcctacatcccggcaggcgtgcggtgccgcccagcggcggccctccccgaccctctatacttgggccgacccccacgcagtctgccgggaaaccggggcgcttccaacgtccgcggtctcctttccgaacattgcttacgcatcaacgagattgccatgtccaacatcgtcatcgccgccgccaagcgcaccgccatcggctccttcctcggccagttcaacggcgtgccgacccccaccctcggcgcggccgccatcgctgccgccctggaacagtcgggcgtaccggccagcgacgtctccgaggtcctcatgggctgcgtgctgccggccaacctcggccaggcgcccgcccgccaggcggcgatcgccgccggcattccgctgtcgaccggcgccaccaccctcaacaaggtgtgcggctcgggcatgaagaccatcatgctcggccatgacctgatcaaggccggttcggccagcatcgtggtcgccggtggcatggaatcgatgtccaacgccccgcacctgctgccgaactcccgtaccggcaaccgcttcggcaacttccaggcggtcgaccacatggcccacgacggcctggtcaacgcctatgacggcaaggccatgggcgaattcgccgaatgcgccgtggacaagtaccagttcagccgcgaggagcaggacgcctacgcgatcgaatcggtcaagcgcgcgcaggccgcacaggccaacggtgcgttcgccgacgagatcgtcgcggtgaaggtagccacccgcaagggtgacgtcgaggtcgccaccgacgagcagccggggcgctcggatatcgccaagatcccgaccctgcgtccggccttcaagaaggacggcagcgtcaccgccgccagttcctccagcatctccgacggcgccgccgcggtggtcctgctgaccgaggaagacgcggccgcccgtggcatcactccgctggcccgcatcgtcggccacgccacccattcgcaggaaccggagtggttcaccaccgccccgatcggcgcgatccacacgctgctggccaagaccggctggtcgctggaccagatcgacctgttcgagatcaacgaggcctttgccgtggtggcaatggcgccgatgcgtgagctgggcatcccgcacgacaagctgaacgtgaatggcggtgcctgcgcgctgggtcatcccatcggtgcctccggtgcacgcctggtggtgaccctggtcaacgccctgcgcacgcgcggtggcaagcgcggcattgccaccctgtgcatcggtggcggcgaagcaacggcaatcgccatcgaattgatttaaaaagatttaacgatgatttcgcaaaaatgaatgcgggatcgcttgacacccaatcttggcttgtcatcatgttgtcggcgcgcagcatgcgcgttgcctaattctaacgacgaggatttacacaatgagcatcaacaagctgctggtcgcgatgtccctggctctggccctggccgcctgctcgaagcaggaagctgcccaggacgccgctgcttcggccaacgaagccgccaccgaagcccaggctgctgccgaccaggccgccgctgccggcgcccagaccgccgacgctgcccagcaggctgccaacaccgccgccaccgctgctgacgctgcgaccgacgctgctgccaacaccgctgctgccgcgaccgacgctgctgctggcgaagccaaggacgctgccaaggctgccgaagctaccgctgagcaggccaaggacgctgctgaagaagccaagaagtaataacttctttcttcacgctgttccggaaaagccgctggttcgccagcggctttttctttgcgccactgcgacctcgcggcgcgggcatcgcgaccccgccttcacaacggcatgaataggctggcgtccccatccattgcagtaccggagaccgccatgaagattcgcccgatcaccaccaccctgctggccgcctccctgctgctggccctggccgcctgcaagggcccggaagccgaacaggccaagcaggacgcgcagcaggccgctgacagcgccggcgcggctgcccgcgatgccgtcgacaaggcggcagaagctacccgtgacgccgccgacaagaccgctgcagcctccgagcaggccgccgccgatacccagcaggcgctggacaaggctgcagacgccaccgccaacgctgccgacaaggccaaggacgccgcaaccgacgccgccgcacacgccagcgacgcgactgccaacgccgcacagaaggtggccgacaaggcccgcgatgtcgccaatgacgcgaaggcgaacgccgccaaggaagaagccaagcactgaggcgtaccggcagccaggcatgggcccggcgctacaggaaaagccgcggcactgccgcggcttttctgcttttcgcttcgcgttttttccgttgattccgtggtgggcgctcctacggcagcgcgcgcaccagcatcgccgacagatccacgcccgccggcaaggtcccgaacaccagcccatgctccgcttgcagccggctgcgcacgaacgcctctgccatcggactttgcgcacgcaacagcagcgcggcctgcaacaacaacactgtgcgctcgcagaacagccgcgcctgcgactcatccggtggcggtgctgctgcccaccgctgcaaagccgctgcgtagcgcgcatcacgatcggccaccgccgccagttcagcgcgcagcgccgccagcgcctccggttcgcgcgccagcgcgcgcagcacgtccagacactggatgttgccgcttccttcccagatcgaattcaacggtgcctgccggtacagccgcggcagcatcgattcctccacatagcccgcgccgcccaggcattcctgtgcttcattgacgaaggccggcgcgcgcttgcacaaccagtacttgcccagcgccgtccccacacgcgccaatgcggcttcgttggcatccacgccggcccggtccaccgcacgcgcgatgcgcatcgacagcactgtggccgcttccgactccagtgccaggtcggccagcacattggtcatcaacgggtgctcgaccagcagcttgccgaacgtgcggcgatgacgtgcgtgatgcagcgcctgcgccagcgccatgcgcatttccgccgccgcgcccagcatgcagtccaggcgggtcatcatcaccatgccgatgatggtggccacgccccgcccctcctcgcccacgcgccacgcctgtgccccgcagaactcgacttcgctggaggcattggcccaatcgccaagcttgtccttcaagcgcatcaaccggaatgcgttgcggtcgccgtcggccagccggcgcggcatcagcaggcaggtcagtcctcccggcgcctgcgccagcaccaggaagccatcgcacatcggtgcggaaaagaaccacttgtgaccgaccaggcgatagcgctcgccatcgatcggttcagcgcgcgtgctgttggcacgcacatccgagcctccctgcttctcggtcatgcccatgcccagcgtgatgccggccttgtccgccaccggtacatcgcgcgggtcatagaccggcgctgcggccttgcgcgcccactcggccaggtgcggctgcgtgtgcagcaccgcaactgccgcatgggtcatcgtcaacgggcaactggtgccagcctcggcctggtggtgcaggtagctcaacaccgcgcgcgcgacatgcccgcccggttgcggctcgtgccaggacaacccggcgaccccgtgcgatttcgctgtgcccatcaactggtgataggccggatggaactccaccgtatcgatgcgatggccctgcgcatcatgcgtgcgcaggcgcggccgatcgcggttggcatcgaagccgagccggtacagttcgtcacccgccagcgcgccatagaccgccagccgcggcgcaaagccgccagcgccttcgcgctgcaccgcctccatcagcgccacgtcatcggtccacaactggcgccccgcgaacgacggcggctggttcagcaccacatgggtttcgtagggcgcattgctgctgaagctgggtccactcatccggtccgtcctggcggcaagagatctgcggtccgattgtgccgcatcgcctgccaagcccgtgttcaggccgattctcaccctgtgcacgagcggccggccacagtgaccgcatggcagtcaatgacgatctggtggtcctgcgccccgaagggctgtactgcgccgccggtgatttccacatcgatccctggcgaccggtcccgcgcgcggtcatcacccatggccacggcgatcacgcacgcccgggcatgggcgaataccactgcagcgacggcagcctgccgatcctgcgctggcgcctgggcgatgtgccggtgcaggcgcatgccgagggcgtgccgttccgcctgggccgggtgcaggtatcgctgcatcccgccggccatgtactggggtcttcgcaggtgcgcatcgacgacgggcagcaggtctgggtggcgtccggcgactacaagcgccagcctgatccaacctgtgcgccgttcgaagtggtgccctgcgatgccttcatcaccgaggccacctttgccctgccgatctatcgttggccggacacgcccaccgtcgctgcggagatcgtggcgtggcgccgcgaatgcgaacagcgcggcgaagctgccatcctgctgtgctatgcactgggcaaggcgcaacgggtactggccgaactgctgccgctggacgatcgcccggcctggctgcacggtgccatcgccaatggtgtggaggtgtatcggcaggccaacgtgccaatgctggagacgctggcggtggccgagcagggtcgccagccggatgccgccggccagttgatcctcgccccgccctcggccgccggcacaccgtggatgcgccgcttcggccgctaccagctgggcttcgcatcgggctggatgcagctgcgcggcaaccggcgtcgccgcaacgtcgatcgtggcttcgtcatttccgatcacgccgattggcccgcactgctgcagaccatcgaacagaccggcgcgcagcgggtgatcgccacccatggcaataccgatgcgttgattcccttcctgcgagagcgcggcgtagcggctgaagccttccgtaccgatttcgggagcgaggaatgaaggccttcgcggcgctctaccagcgcctggaccgcagcaccgccacgctggacaagcgtgcggcattgatcgattacttccgccaggcaggcgcgcacgatgcggcgtgggcgctgtacctgctcagcggtggcaaggtgggcggcgcacgccgcaagatcgccgccagtggcgaactgcgcgcctggattgccgaagaatccggcttgccgccatggctggtggaagacagctatgcgcaggtcggtgacctggccgaaacgttgaccctgctgctggatgatccatcccagccggccgccgaccgtgcgttggcggattggatcgaacagcatctgctggcggtggccaaccagcccgaagcggtacgccgtgcggcggtcgtcgcgggctggcagcagctgtgcagcagcgaacgcctggtgttcaacaagctgctgaccggcgccctgcgcgttggcgtctcgcagcggctggtgcagcaggcactggcggagtggtccggcctggacatcgcgcgcatcgcccagcgcatgcttggcgagtgggtgccctcgcccgcactgctgggccagctgctgtcgccggatgagctgccactggaccggcagcaaccctacccgttcttcctcgcctcgccactggaaggcgatcctgccgaacgcctcggctccatcgaagattggctgctggaatggaagtgggatggcatccgcctgcagctgctgcgccggcgcggcgaggtcgcattgtggtcacgcggcgaagagcggctggatggtcgcttccccgaaatcgaacaggcggcgatggcgcttcccgatggctgcgtgctggacggagagctgctggcctgggacgaagccacggacctgccgcgtgcattcaccgcgctgcagacccgcatccagcgccgcaagcccggtgcggctaccctgcgcaacacgccggtgcgcgtgctcgcctatgacctgctggaacacgatggcgcggacctgcgtgagttgccgttgcgggaacggcgtgcacggcttgccgacgtcgtcggtgccctgggtgatgcacggatccagctctcacccgacgttgccgccgaagactggccgcaggcggcggcgatgcgcgatgtggcacgcgaacgtggcgtggaagggctgatgctgaaacgtcgtgcctcaccctaccaggccgggcgacgccgcggtgactggtggaaatggaaggtcgatccgctcaccatcgatgcagtgctcctgtacgcgcaggctggccatgggcggcgcagcacgttgtacaccgactacaccttcggcgtctgggacggcgacacgctggtaccggtggccaaggcctattcgggcctggatgacaaggagatcctcgcgcttgatcgctggatccgcgccaatacccgcgagcgctttggcccggtgcgcagcgtacgccccgaacacgtcttcgaactgggattcgaggcggtcaaccgcagcagccggcacaagtccggtatcgccgtacgctttccacgcatcctgcgctggcgccacgacaagccagccagcgaggccgatcagctggctaccctgcaggcgctggcgcgatgaaccgcagccaggcactacgccggctggaagactggttcgcgtcgaaaggctggcgctcgttgccgttccagcgcgcgatgtggcggcactatctcgccggcggatccgggttgctgcacacgcccacaggcagcggcaagacactggcgatgttcgggggaccgctgctgcaggccatgatcgacccaccgccttcgccccgccgcgccggtgcggtacgcccgctgcaggtgctgtgggtgacgcccttgcgcgcgttggccagcgacaccgcgcgtgcgctgcaggccgtggtcgatgggttgcagcttggatggcgtgtcggcctgcgcagcggtgacgccagcaaccgcgaacgacgacaggcacgcgagggccgcatcgacgtactggtcacgacgccggaatcgctggcgctgctgttgagctatccggatacgctgccgcgcatgcgccagctgcgctgcgtggtggtggacgaatggcacgaactgctgggcaacaagcgcggtgtcctgctgcagttgaatctggccgtgctgcgcgatgccgcgccggcattgcagctgtgggggctgtcggccacgctgggcaatctggatgaggcgcgcgacgtgctgctgcccggacagcccgacgcgccgatcgtgcagggcgtgcgcccgcgtgcgaccacggtgcgcagcctgctgcccgaacccggtgaacgctttccctgggccgggcacctgggcctggcccaactgccgcgggtgctggacgcattgatgcaggcacgcagcagcctgctcttcaccaacacccgtgcacaggcagaactgtggcatcaggcgctggcgtcggtttggcccgaggaacacgacacgctcgcgctgcaccacggttcgctggatccggcgctgcgccagcaggtggaggacgggctgcgtgcaggaacgctgcgctgcgtggtcgccacctccagcctcgacctcggcgtggactttcccgaggtcgaacaggtactgcagctgggcagcccgaagggcgtcgcccgcctgcgccagcgcgccggacgtgcgcgccatcgtcccggtgccagtggcgcgatcctctgcgtgccgagccatgcgctggaactggccgagtacgcagccgtgcgtcgcgcactggccgaaggcgtggtcgaagcacgcaggccaccgatgctgtcgctggacgttctggcccagcatgcggtcagccgtgccctggccggtggcttccacggtgatgcgctgctggcgcaggtccggcgcacccatgcgttcgcatccctggccgaggaccagtggcaggccgtgctgactttcatcgtgcaggggggccaggccctggcccagtaccctgacttccacaaggtcgtgcaggacgccgatggccgctaccggatgcacgaccggcgccaggcactacgccaccggctgtcgatcggcaccatcagcagcgatggcagcgtgcgcgtgcagttcctgcgcggggccggcctcggcgccgtggaggaacagttcgccagccgcctgcgccgcggagaccgcttccagttcgccgggcgcctgctggagctggtgcagctgcgcgacatgaccgccttcgtgcggctggcacgagggcgcggtgaaggtgtcgtgccccgctggcagggaggccagctgccgctgtcgatggcactcggcagcgaactggagtcggtgctgtcaggcgccgacgacagtgcggaagcgcgctggctggcaccgctgctggcacttcagcagcaggtgtcggcgcttcccggcccggaccacgtgctgctggaagacgtacgccgccgcgaaggccagttcctcttcgtctatcccttcgccggacgccacgtgcacgaggcgctggccgccctgttggcactgcgctgcacccgccagcaacgcaacagcatcggctatgccgtgaatgatcacggcctggtgctggcaccggcgcaggcgatcgacctggacgcggcgcaatggcatgcgttgttcaccaccgatcagctgctggacgatctgcgtgcggcggtgaacctgggcgagcttgcgcggcgccagttccgtggcatcgcgcgcgtcgcaggcctgctggtacccagcctgccggggggcatgccgcgatcgctgcgccaactgcaggcctcggcgggcctgctgtacgacgtgttgcgcgagcatgaccccgagcacctgctgctggcgctcgccgaacgcgaagtgctgcatgacagcctcgacctgccggggctgcgccaggtgctggtccggatcggcgcgcgacgcatgtcgatgcagcgccctccatcgctgacgcccctgggctttccactgtgggccgaacgcctgcgcgggcagttcagcaacgaggactggcgtacccgcgtgcaacgcgcggcccagcagctggaacgtcgccatggccgatgaaataccgctgctgcttgccggcgaaccggtgaccctggcgggcgcacgcgcactctactggccggcgcggcaggcgctgctgatcgcggacctgcacctgggcaaggccgatgtgttccgccgcgccggcatcgcgctgcccagcggcggaaccggcgaagacctgcaacgcctgcagggtctgctggacaggcatgcctgccgcgaactgtggatcctgggcgacatcctgcatgggccggcgcatcgcgccgcctggtaccagcaatggctcggctggcgcgaacgcaacaccgcactggacgtgcatgtcctgcgcggaaatcatgaccggcagctaccgcatgcccagctgcaggtgcagatccacgaggaggtgcggctggcgccgttcctgctgcgccatgaaccgtgcgcagatccggcgtggcacgtgctcgcaggccacctgcatccgcaggtcgcactgcccgcattgcgccggcgcttcccggccttctggctgcgcgagcggatgacggtcctgccggccttttccgggttcaccgccggaatcgtgcctgctcccgccagcggcgaacagatgatcgcctgcgtggaaaacggcctggtggaactgccagtggcttgaatcaggccggacgaatgtccagctgcggcatcaactggaactcaggcgtgtcaacttcacgtcgccgcggcaaggcctggattgccgccagcatctcctgtgcgcaggcgcggatgcgtccgtggtgctccggcgatgcatgactgatcaagctgcccacatggaattcgaacacgtcctccagtacgtcgggctggtcctcgtgcagcatctgcaacagtccgcgcagcttgcagatttccgattccagctcctcgaccgcgaaccacatggcgtcctcctcttcaacaacaggcggcacgtccgggccgcgacaggccgcaacggcagcgccgcccgggccacgcgcgatgtcaatcacggaaaggaaaacgggcgacgcgcaatcgcgtgcaacctacttctcgcatatacacggtgaggcaaccgttaattcgcgtgacagcgcgcttcacgcattcgcagtgatcgcgctgatgccaggcatctgcgcccctgcagccaacgcgtcgacaaatgccggatccagcgcaagcgaaccgaaccagccatgctgggtaccgctgagcacgcgcagcatgtggccacgcccacccggcaggcgccccatcggcccgagcagcacgtcgcgcgcctttgcccaggcatcgcgatcagactggaacagcggcgtcagccaacggctccagcgctggtagaccgcaacgtgcgccctgcgctgcgcctggtaggcctgcaatgcagcgcctcccccgccatgtgcgcgaacggcatcgcgcaatgccagcgcatcgagcagcgccatgttcacgccctgccccagctgcgggctcatcgcatgtgcggcatcgccggccagcaccatgcggccgcaatgccagcgcgtcatcacggcgtcacggtagaccgcgcgcgccagctggccggcatcatgcagatgcgcaaagcgcgcgctggcctgcggccacagcgcgtgcagctcgtccagccagggcgtcatgccatcggcctgccatcgttcgaagtcggcgcgtggcaggctccagaagaagctcaggcgcggcgtgtcatcacctggccgcgtaccgaccggcagcagcccgatcatcttgcgcgcggccacgtagcgctgccgcagctcctgcaggtgcggccagtcctcggccggcagcaggcaccacagtgcgccccagggatacacgcggtccagcccggtgccgccttcgatcgagccgcgcagcgtcgaagccgcaccatcggcggccaccaccaggtcgaacggcccatgcatgcggccctcactgtcatgcaggcggccctgtgcggcatccactgcggcgatggtgacgccggcatgcagctggcccgcacccgcacgcgccccgtccagcagcgagaacagcgccccacgctgcatgccgaggccgtgcaggcgcgcgtccaggccgtcatagcgcatgtccatcaccgtgcgctcgcacggtgtatcgccataaagacggtgcaccggcgccgcatgcgcgcgcacggcatcaagcaggcccatctgccacagcacctgcaggccgctgggctgcagcaggaagccggcgccaaccggccccggcgagggcacgcgttcgaagatctccacctcgtggccatcacgagagagcaggatggacaatgcctgtccagcggtgccgtagccgatcacggcgatgcgcagtcgttccttcatcggcgcattgtgcccgagcgcaaatccggatggccacctggaaccctgtccacagcgccgcaatgcccgtcgcgacgcaaaaaaaaccccgccgaagcggggttttcaacgcactgtcgagtggatcactcggccggcgtgatgttcgaagcctgggcacccttcgggccctgggtcacgtcataggtgacacgctggccttcctgcaggctgcggaagcccttggagttgatggcggagaagtgcgcgaacacgtcggcgctgccatcctccggcgagatgaagccaaatcccttggcgtcgttgaaccacttgacggtaccgttcggcatggtgatgcgagaccttatgcaatgaatgggtggtgtacgctgaacccgcgcacaagctgagtatgcaaagcttgctcggggaagacaatcacccccgcgccaattcgcccaccagttccggaagtccgttgctggccgcctgcacgttcgccagtacttcggccatcgtaatctcctcgccatcaccgcagccggcggcccagttggcgatgattgccaggcaggcgtaatccagccccagctcgcgtgccagcgcggcctccggcatgccggtcatgcctaccaggtcgcagccgtcacggcgcatgcgggcgatctcggcgatggtctccaggcgcgggccctgcgtcgcgccgtagcagccaccgtcatggaccgtgacgccggtcactttcgctgccgccaggatcttgctgcgcagcatcggcgtataggggtggccgaaatcgacgtggaccacgtcggtgccttcttcttcacagatcgtgctgatgcggccccaggtgtagtcgatgatctggtccgggcaggccagcacgcgcgggccgaagtcttcggtgatgccacccaccgtgttcaatgccagcacgcgctgcgcgcccagctgctgcagtgcggccaggttggcgcggtagttgatcttgtgcggcggcagtgagtgcccctcgccatgccgcgccaggaacgccacgcgatgaccgagcagcgtgcccacgcgcaccgggccggacgggcggccaaagcgggtgtcgacctcgtgggtctgcacgtcgtcgagcttggccaggttgtagacaccggtaccgccgatcacggccagggcgatctgttgcattcaaagcactccatggaaagacgaacgccggcatccgaggatgccggcggtggaagaagacgcgccgcaggcagctgcgccgttactccttcattgcgtagatcgccggcacgcagcgcagggtctcgttgacgtccatgccgaagccgaacacgtagcggtccggcagctcgatgccggcgtagtcggcggtcacgtccggcagtgcgcggtcgtgcttcttcacggtcatcgcggcgatgcgcacgtcggtcgcgccctgctccaggcaccaggtgcggacgccctgcagggtgtagccctcgtcgaggatgtcgtcgatcagcagcacgcggcggccgaacagcgaggtggccggcttgtgcttccagaccaggtctccgccggtggtttcaccgcggtagcgggtcgcgtgcaggtaatcgaactgcacgtcctggccgcgcgcgcccagttccagcgccagctggccggcgaacggcagcgcaccatgcatgatggacaggaacagcggcacctcgcccttgtaatcgcgcgcgatggcgtcggcgataccagcgatggccttgtcgatggtggggcggtcgaccagcaggtcagcctgggccagggcctgggaaatggtgaggttgggcatcagacggttcttccaagggtttcaagcagacgggattgggtgtcgccatggcgggcgtcggccagcaggccgtcccagccgagcgcgccgcggccaagcaggcccagcagcgcagcagtattgagggagcgtccctgcaccgcgtgcagggcttcatcgaccagttccgggtggcagaccagcaccacgtcgcagccggcatccaggtgcgcgtgcacgcgtgccggcacgccaccggcactgtgcgaggcggccatgccgatgtcatcggagaacaccacgccacggaagccgagctcgccacgcaggatgtcctggatccagcgcggggaatagccggccggctccggcgccacctgcggatagatcacgtgcgccatcatcaccgcatcggcaccggcggcgatgccggcctggaacggcaccaggtcctgggcgcgcagttcgtccagcgcgcgcgggtcgatcgcggtatcgacgtgggtgtcttccagcacggtgccgtggccggggaaatgcttgagcgtggcggccatgccgaccgcatgcatgccgcgcacataggcggcggtgaacgcggccaccacctgcgggtcttcactgaaggcacggttgccgatggcgcggttgccgcggccaaggtcgaccaccggcgcgaaactcaggtcgaggccgctggcacgtacttcgctggccatcagccaggcatgctgctcggccagggccagcgcctgctgcgggtcggcggcgtacagcgcgccgatgtcctgcagcggcggcagcgcgctgtagccctcgcggaaacgctgcacacggccgccttcctggtccacgcagatcagctgcgggcgcggggcggcggcacggatcgccgcactcagatcggtcacctgctggcgcgaggcgaagttgcgcttgaacagcaccaccccggccacggcgtcgtgctgcagccagtcacgttcctgggcggtcagttcggtgccggcaacgccgatcagcagcatggtcgatctccacaacgcgcgcccgcatggcgcagtgccgcattgtcgcagaaccggccgacaggcgcaggggtcagacgaaggggagtgtggggtcagagcccctgcggggatctgaccccgatctgctcagaccttgcagccgtccgggccgcaggcctcgtcgccgtcagccgaagctgccggggcgccctgttcggctgcgatctggcgaagggcgttggcgaaggcctctggcggctgggccccggaaatggcccacttcccatcgatgacgaaagtcggcaccgaggaaatgcccagtgcatgggcctgcgccagcctggcttcgacctcggccaggccgcggtcggagcccagcatctgcgcgatttcagcaccgtccaggccgccagccacgccggccttcaccagcactgcagtatcggccagattctggccatgctcgaagtgggcacggaaaagtgcttcgccgaccgcatcctgcacgccgtgctggccggccagccacaacacccgatgggccggcagcgtggtcacccgcacctggccctggctgaaatccatcggcaggccctcggcccgcgcggtggtctgggtctggccgaggatctgctcggtgcgctcgacgccaccgaacttgcgcacataggcctcgcgcagcggcaccggggtggcgtccgcgtccgggtccagctggaacggctgccagtggatatcgagttcaggcgcattggcgccgagcaactgcacaccctgctggaagcgatgcttgccgatccagcaccaggggcagaccacgtcggagtagatgtcgattctcatccccaccacatggggcccgcctccctcgaaaaaaggggacggaggggattaagtcgtttccagcacagctggggtaaagacgacttaatcccctccgtccccttttttgggggcttcaccactgtgaataggggtgactggccagtgcgacgttgtagtagcgcgcgtcgtcggtgacttcggcacccacccagtccggcagttcgatcgcctggtcggcactgtccagctcgacttcggccacgaccaggccggcgttgtcgccgaagaactcgtccacttcccaggtcaggccggcgtgttcgaccaggtggcggcgcttgtcgatcaggccaccgacgcacagcgccaacagggcgcgcgcatcctccaccgggatcgggtagtcgaactcctggcgggtatggccgatggtgcgcgacttcaggttcagcgcggcgtggtcgccttcgatgcgcacgcgcaccgaggcgttctgggtgccgcggtcgagcgcgcccatgtcgttgatgtagccctgcgccatcgggatcacccgatgcgcggcggtgcgccagccatcactgctgacgaggaatttgcgttcgatttcgatgcccatcgcgccattatgcgcgatgggtgatgacaacctgtcagcgcttctcgaacaccgcgatgctttccacgtgcgcggtatgcgggaacatgtccatggcaccggcgctgaccagggtgaagccctgttcgttgaccagatagccggcatcgcgcgccagcgagcccgggtggcagctgacgtagacaatgcgcttgaactgcttcagcggcagctgctgcagcacttcgatcgcacccgagcgcggcgggtccagcagcagcttgtcaaagccctggcgcatccacggggtgctgcgctggtcctgggtcaggtcggcgctgaagaactgcgcgttggccaggccgttgcgctcggcgttctcacgcgcacgcgccaccaggccggcatcgccttccacgccaaccacctcgcgcacgcggcgcgccagcggcagggtgaagttgcccaggccgcagaacaggtccagtacacgctcgtcctcacccggttccagcaggtccagggcgtgggcgatcatcttctcgttgagcttggcattgacctggatgaagtccagcgggcggaacgccagctcgacatcccacggcgccagacggaacgacagcggcacatcctgcccgtccagcggctgcacggtatccacgccgccggactgcaggtagatcacgaagccatgctgctggccgaaagccgcccaggccgcgcggtcggcatcgctgagcggctgcagatggcgaacggtcaggaccacggcctggtcaccggcgatgaattcgatctgcgggatgtcacgcttgccatcgagtgactcgatgaaggtggacagcgcctcgaccttggtaccaatctcggggatcacggtcaggcactggctgaggtcggcaacgaagcgcggatcctgttcacggaagccgaccagggtcttgtccttcttttcgacccggcgcaccgagaaacggcccttgcggcgatagccccagctctcaccgaccagcggcgccagcacggtgcccggcttcacatggccgatccgctccaggttgtccatcagcacgcgctgcttggccacgatctgctggtcttcgtccaggtgctgcagcacgcagccggcgcaggtgccgaaatgcgggcacttgggggtcacccgctgcggcgaggcctgcagcacctccagggtgcgcgcctcgtcgaaatggcggctgcgggcagtctgttcagccatcaccacctcgccgggcagcgcgccgctgacgaaggtgaccttgccgccctcgccttcacggcgggcgacaccgcgaccatcatggctgaggtcgaggatctcggtctggaatggggtacggtcagtgcgggaacgggatcgggccacgtggcaacaggctgcgggcaaaaatgggggcgtattgtcgcagatcctgaccgacggggcctggacccgcttgcgcccgtggccgtcgtgcttgatgattgggccagctgacatggaggcagccctgatgcagatgaccccgcgggccgcacggccccgcttcctgcttgtcgaggacgacatcatcagccgcggttttttcaaggcggcgttggaaacgttaccggcggatgtggataccgcagattccctggccagtgccctggccagtgccgaacccggcgcgcatgatctgtggctgatcgacgtcaacctgccggatggcaatggcgcgcaactgctgcgtgagctacgccgctcacatcccgacacaccggcgctggcacatacggccgacggcgatacctccatccacgcccgcctgcgcgaagccggtttcagcgacaccctggtcaagccgctgggccgcgaccagctgctgaaggccgtgcgccgtgcgctggtcaacagcccggcgggaatcttcgtggcacaggccccggccgcggtcgagctggccgttcaggactgggacgagactgcggcattggccgcgctcaatggccagcgcaaccacctgatcgcactgcgcgagctgttcctggccgagttgcccggtgtgcgcgacgcggtcgagcaggcggtggaccagcacgacgagcgccagctgcgcagccagctgcaccggttgcaggcgagctgtggcttcgtgggggcggcacggttgggccgggcggtgcgccagctgcatcatgcacccgagtccgggcaggcccaggacgggttccgcgccgcggtagctgccctgctgcattgagggtttttcggcagggctgcgccctgcacccgcagaggcttcaagccaaggcaacagcaacagcaacagcaacggcatgcattccgtgggttggcggtgcggtatcggagggcggggacgccgtaaacccgtccttgggggcttggcagccgcatccatgcggctgacaccccgccctccgataccgccccacctcttacagttttccgcgatcgggtagatccacgccatgcgtggatgaatttctgtcagatatcgaaatcaatctggggtcggatccgttttcctgcggaaaacggatccgaccccacgccgttccgacagttcgcggaacactgtcgaaggcggggtgggtccggttgcgggagtgtccgcggcatggatgccgcggccaagcccccagggacgggtttacggcgtctcccgcaaccggacccaccccgcctacccacggatagccagcttttgccgttgacgttgattcggcaggtgcagggctgcaagccctgccgcccccccctacctgcgcggcgcaagctgctcgagcatttcccaggacttcagcccgcgcgcgcccaggtgatgggccagcacccgccgcatcggcaggcgcaggctggccagatcggcggcatccggttcttcgtcggccgcaagggccagcagcgccgagccagtggccgccgcccggcgctccccgccacgctcgctcagcaggcgctgcgccccttcctgcgggtccagctcgtagcgcgccgccgggtcgatcggctggccatcactggcactgtccagctcgaaacccaggcccagcgcggacagcagttcgcgctcgaaacggcgcagggtccaggccaggccggcaccgaccgccagccgcgcgcgtgcctcaccgtaggcaaggtacagctccggcagcgggtcctggcgcggggccaggcgcagggtcagttcactcaggtagaagccggccaacatcgcctggccgaccaggcgtggcgcggcatccagcgcctcggcaccccgcagctgggccagttcaccccgctgctgggcactgaagcggatccactgcaacggctgcagggcggcgcgcagcacctggcccttggcggtggacacgccacgcgccagcaggccgatacggccatgctgcgcgctcaacacttcgaccagcaggctggtctcgcggtaggcccgtgcgtgcagcacgaagccggtgtcgtcctcgatcatcatcgaagcgaccgtcgcggcttattcgtagccgaaggccttcagcgcggcctcgtcgtcggaccagccttcacgcacgcgcacccaggtttccaggaacaccttggccccgaacagacgctccatctgcaggcgggacttggcgccgatctccttcaggcgggcgccgcccttgccgatcacgatggccttctgcccctcgcgctcgacccagatcaccgcaccgatgcgcagcaggttgccatcctcggtgaagcgctcgatctcgacggtggttgcgtacggcagttcctcgccgagctggcgcatcaactgctcgcgcaccagttcaccggccaggaaacgctggctgcgatcggtgatctcgtcctcgccgaacatcggcggggcttccggcagcagcttcagcacgtcgcgcaccagtgcttccaggccgttgcgcttctgcgccgagatcgggtgcacggcggcgaaatcacgaccttcggtcacctgctgcaggaacggcagcagcgcgcccttttccttcaggcgatcgatcttgttgaccaccagcaccaccgggatgccggcgtcgcgcagcacgttgaacgccaggctgtcctcttcatcccagcgaccggcttcgatcaccagcagccctgcatcgacgccttccagcgagccacgcgcggcgcggttcatcacccggttcatcgcccgcttctgcaccttgtgcaggccaggggtgtcgaccaggatcagctggccttccggataggtggcgatgcccagcaggcgatggcgcgtggtctgcggacggttggagacgatgctgaccttggcgccgaccagggcattggtcagggtcgacttgcccacgttcgggcggccgatgacggccacgctgccgcaatgatggggagtttgttcgctcacttggaatccagttgtgctaggacggccgcagccgcctgttgttcggcaagccgccgcgaggcgccttcgccctcggtgctggcggccgggtcggctacgttgcagcgtacccggaagtgcttggcgtggtcgtcaccggattctgacaccagttcatactgcggcaacgccttctgtcgggcctgcagccattcctgcaggcgggtcttggggtccttctcgggccggccggaggccggcagtgcctcgatcgaagcgctgaaccaggacagtaccaccgcccggcaggcctcgaagccggcatccaggtagatcgcagccaccacggcttccaccgcgtcggccaggatcgaatcacgacggtggccgccggacttcatttcgcccggacccaggatcagtcgatcgcccagttccagggtgcgcccgatcaccgccagcgcgccttcacgcaccagctcggcgcgggcacgggtcatcgcgccttcgtcagccttgggccagcgctggtacaacgcctcggccgccatcatgttgacgatgctgtcgcccaggaactccaggcgctcgttgtgtggcgcaccggcactgcgatgcgtcagcgcctgcttcagcagcgccgggtcgcggaagggatgaccgatcaggtcaccacgttggaaaggtttattcggcaccgcttcgggtcaggtcctgggatgaatcgaatttgccaaccacgtccaggttgccgaccagcggacggcgcacttcgtagttgaccttgagggtccagccattgtcgcggcggtcgaacttcacgttggccggcttcacgttttccgagtagttgatgtacagccgcttgaagaacagatcctggatccgggccggttccatgctgcccacacccggctcgttggccaggctcttcatcgccgagcgcaccgcgtaatactcctggtacatcgggaacagcttcatgccgatgtaaaggaagaaaccgaccacgatcaggaccgccaggaacgaggtcagggtcatgccacgctgcgtgttcatcgtcttcattgcgttctccccagatacgcgttggatgtgaaaatactcggttgatgcccgatcagttgatgctcgagccgatccgcgacggctcgaagccatccttgcagaaccagccctggcagttcagccagatcaggaaggccttgccgcgcaggttttcttccggcagcaggccccagaaacggccatcgtcgctgttgtcacggttgtcgcccatcacaaggtacttgccggccggcacggtccactggccctggccacgcggatagtcggtctccagcacggtgtgggttcgacccggcaggtgttcgaccagcaggttggcaccctcgccctggcccttgtggcctgcatagatgcccttgttgtcgtacttcagcggttcgccgttgaggatcacgccgtcgccttcgaagaccacggtgtcgcccggcacgccgatgacgcgcttgatgaagttctcacccttggccggatcgttgtcgctgtggccggggaagtggaacaccaccacgtcgccgcgcgacggctcgccaaacggcacgatcttggtgttgctgatcggcaggcgcaggccgtaggagaacttgttgaccaggatgaagtcgccgatcagcaggttcggcatcatcgagctggacgggatcttgtacggctcggcgatgaaactgcgcacgatcagcacgatcgccagcaccgggaagaacgcacgcgagtaatccaccagcaccggctcggagtcgagcaggcccgcgcgctgggcgcgacgcttggcgaggtacagcttgtccgcgagcaggatcaggcccgaggccagggtcagcacgaccaggaggatctcaaacagtttcattcagggtcctttgcaacgtcaccagacgaccggccccgcagggccggtgcgggccttacttgttgtccatctgcaggacggccaggaacgcttcctgcggaatctccacgcgtccgacctgcttcatgcgcttcttgccttccttctgcttttccagaagcttcttcttgcgcgaaacgtcgccaccatagcacttggccagcacgttcttgcgcatggccttgaccgtggtgcgggcgatgatctgcgagccgacggcggcctggatggccacgtcgaacatctggcgcgggatcaggtccttcatcttctcgcacagctcgcggccacgtcggtcagcgtggctgcggtgcacgatcaacgacagcgcatcgaccttgtcaccattgatcagcacgtccacgcgcacgaacgggcctgcgtcgaagcgcacgaagtggtaatcgagcgaggcatagccgcggctgaccgacttcagcttgtcgaagaagtccagcaccacctcggccatcggcagctcgtagctgatctgcacctggctgcccaggtagttgatgccgatctggctgccgcgcttttcttcgcacagcttgatgatgttgccgatgtactcctcgggggtgagcacgttggcgcggatgatcggttcgcggatttcctcgacctggttcaccgccggcagcttggccgggttgtccatgttgatgatcgagccatcggtcttcaggacctcatacaccaccgtcggcgcggtgctgatcaggtccaggttgtattcgcgctccaggcgctcctgcacgatttccatgtgcagcatgcccaggaagccgcagcggaagccgaagcccatcgcttcggagctttccggctcgaaacgcagcgcggcatcgttcaggcgcagcttgtccagcgcttcgcgcaggtccgggtagtcttcggcatcgaccgggaacaggccggcgaacacgcgcggctgcatttcctggaagcccggcagcggcttcggcgccggatcgccggccagggtgagggtgtcgccgaccggcgcgccatgcacgtccttgatgctggcggtgacccagcccacttcaccggcacgcagcgccggcagcaccttgcgcttcggcgtgaacacgccgacgttgtcgacctggtggttgcggccggtcgacatcacctgcagcttgtcaccggccttgatctcgccctgcatcacgcgcaccagcgacaccacgccgaggtagttgtcgaaccacgagtcgatgatcagcgcctgcagcttgtcggtgtcgcgcggcgccggcggcggaatgcggtgcacgatcgcttccagcacgtcctgcacgttgaggccggtcttggcactgaccggcacggcgtcggaggcatcgatgccgatcacggcctcgatctcggccttggcgcgctcgatgtcggcggtgggcaggtcgatcttgttgatcaccggcaccacttccaggccctgctccacggcggtgtagcagttggccaccgactgggcttccacgccctgcgccgcatcgaccaccagcagcgcgccttcgcaggcggccagcgagcggctgacttcataggagaagtcgacgtggccgggggtgtcgatgaagttcaggtggtaggtctgcccgtccttggccaggtacggcagtgacaccgactgcgccttgatcgtgatgccacgctcgcgctcgatcggattggaatcgagcacctgcgcttccatctcgcgggcctgcaggccaccgcagagctggatgatgcggtcggccagcgtggacttgccgtggtcgacatgggcgatgatggagaagttgcggatgttccgcatcgaatcagaagacataggtggcggcggcgcgcggcgtcgtcagggtaacggtcgattatcgcacgcccagcgcccggccgcgaaaaccggctgccgggcaccggcccggaacgaccgaagccccgccggggcggggcttcgggggaggcccaggggccgccggagcggccccggcaggccctactggccggccttgaccgccacgaaggcgctgttgccattggccgtgcggaccagcagcatgaccacgtcgtccttcttgaagctggacagcgcccggttcagggcatccacactgccgaccgcgacgcggccgacctgcaggatcaccatgcccggcgacaggccggcatcacgcgccgcctggcccttgaccccggtgatgcgcacgccttcgttgccgttgagcccgaactgcttgcgctgagccgcgctcaggtcgctcacgtccagccccagcagggcattggccccggtctgcggcgccgcctcggcaccgccggccgacggcccgcgggcactggcctgcccgtcttcactcagggcggtcaacgtggcactgaggtcatgcggcttgccgtcgcggtacaccaccaggttcaccttgctgcccggcgccatcgcaccgatcagcggcggcaggtcggaccagctgttgaccgggctgccgttgaccgagcggatgacgtcgcccacctgcacgccggccttggcggccgcactgccggccacgatctggttgaccagggcgccacggctgtccggcaggcccaggccctgcgccttcagcgaatcgatcggctccacgaccgcgccgagctggccgcgggtgaccttgccgctcttcttgatctgctccaccgcgctcatcgccaggtcgatcgggatcgcgaagctgatgcccatgtagccgccggacgcggagaagatctgcgagttgatgccgaccacttcgccgcgggtgttcagaagagggccaccggaattgccctggttgatcgccacgtcggtctggatgaacggcacatagcgctggtcggggccgcccgtactgcggccgacggcgctgaccacgccggcggtgacagaatggtcgaggccgaacggcgagccgatcgcgacaacccactgccccggcttcaggctgttggagtcacccacgcgcacggttggcaggttcttcccgtcgatcttcagcagggcgacgtcgtactgctggtcgctgcccaccaccttggcggtgaactcacggctgtcgcccagcttgaccttcacgtcactggcgtcggccaccacgtggtaattggtcagcacatagccatcgggcgagatgatgaagcccgagcccatgccacggcccttgatgctggggccaccgtctggcccacccggcccctgccccggcatcgggaagtcgggaccaaagaagcggcggaagaactccggcatgtcatcgtcgcccatcgggccgcgcgcggcctggcggttgttgcggacgatggtggtatcgacgttgaccacgcccgggccgacctgttcgaccaggttggtgaagtcgggcaggccactgaccagcggctgcgccggtgcccgcgcggccgcggctggcgcgggctgggtctgcgcgacgggcgccggcgcctgtgcgcaggccaccaggggaagggtcagggccagcaggccaatggcctgcgtgcggagtcggggagtcatcggacggcaacctccgggtcgggtggaaagaggaatacgggccccgccgacggcggggcgtgaaggcgcccggctcagtcgcgcgggcgcggcggcaccggcagctcatcctgcaggcgcggctcgaacggatagaacgcggcactaccggcgtgggccgggaagctggcattgagcgcgccgccagcggcgggcgccaggctggagcgcggccatggccgggcctgcagcccgctgacctcgccgaacggcaggttgcggttggcgttggccggcacggtcggggtcaacggtgcctgcacggccgcgatggcgcgctgcgaagtgtcgtcgcgctgggcggcacgcgcggcctgctggctgcgcgtagcgctggcacggcgggcgtcctggcggcggcccgccgcggccatcgctacggccggcgcagcagccacggccaccgcggccgtgtccaccgaagcctcggtgactggggtgggcgcggccggtgccagttccgcctggctggcgatcacctgcggcgcctgcggttcacccggcgtcgcctccttcaatttctcgccgccgatgaacagggcgaccgcggccacagatgcggccagcgcagcaccgccgccccaggcgcgccagccactgcgacgcacctggcgacgcggctcggcctgcggcgtcggctctgccgcaatggcggccgcaacggcggcactgaagccggccggtgccaacgccggggcctgcccgcgcatcacgtcgcccagcagctgccagcgctcctggcagccggccagttcggggtcgtgttccatccggcgcagcaggaagcgcgcttcatcggcacccagctcgccatcgaccagggccgacagctgctcgcgatggcgctggtccaggcgctgcccggcgggcgattgatggttctgcgattcgttgaacggattactggtcatacgcggctcttctcacgggtggcgctgccgatgtccaacagcggccggagttcggtgtcgatcgcctcgcgcgcccggaagatccgggaacgcacggtgccgatcgggcaccccatcttctgcgcgatatcctcgtagctcaggccttccacctcgcgcagggtgatcgccgaccggagttcctccggcagcgcgttgacggccttcatgaccgtctgttccagctcctggcgcatcaactcgcgctcgggcgtgtcggtgtcccgcaggcgggtaccgctgtcgaactgctcggcgtcaccgatgtcgatgtcatcggtcggcggacgacgattgtgtgaagccaggtagtttttggcggtattcacggcgattcgatgcaaccaggttgagaactgggcatcgccacggaaactcccgatcgcgcggtaggcacggatgaaagtgtcctgggcgacgtcctgacattcgctccagtcggcgatgtagcgaccgaccagggccacgacccgatgctggtacttgcgcaccaggacatcgaacgcggcactctcgccgtgctgcacgcgccggaccagctccagatccagctcctgaggtgtatcaacatcggccatgaggggccgcactcctgtcagcccaaccgacgtcgggcaatgagactgccaatcccgggaaaagttcagtcgccgatcacctggcgccgcaccagcttttaaccaccattcggttagcgtcccgatccacggccatggatccgggggcgccactcccctgctattgggatttgacgcgggggaaacaacctctggatcatagccgcttctccatacacaaccggatggaacgtccatgctctcaggcttcgatggtctccgcttcagccactggcaccccgagatccgcgacgacggcgtggtggttctctccctggatcgccaggacagcagcgtcaatgcgatgtcgcaggacgtgctgctggaactgggcgacctgcttgagcgcattgccctggacccgcccaagggcgtagtcatccagtcgctgaagaaggccggcttcattgccggtgccgacctgaaggagttccaggaattcgaccgtcgcggcaccgtcaacgacgcgatccggcgtggccaggccacctaccagaagctggccgagctgccctgcccgaccgtggcggccatccacggccactgcctcggcggtggcaccgagcttgccctggcctgccgctatcgcgtggcctccaatgacagcagcacccgcatcggcctgccggaaacccagctgggcatcttcccggggtggggtggcagcgcccgcctgccgcaactggtaggcgccccggcagcgatggacatgatgctgaccggccgcaccctgtcggcctcggccgcgcgtggcatcggcctggtcgacaaggtggtggcaccggcggtggtgctcgacacggccgttgcactggcgctgtccggcaccacccgcccgttcaagcagcgcgccacggcctgggccaccaacacctggctggcacgcacgctgctggcaccgcagatggtcaagcaggtcgcccgcaaggcgaagaaggaccagtacccggcgccgtacgcactgatcagcacctggcagcgcagtggcggcaagccgatccaggcccgcctggacgccgagcggcgtgccgtggtgaagctggccagtactccgaccgcgcgcaacctgatccgtatcttcttcctcaccgaacgcctgaagggcctcggtggcggtgattccggcatccgccacgtgcacgtggtcggcgccggcgtgatgggcggcgacatcgccgcgtgggccgcctacaagggcttcgaagtgaccctgcaggaccgcgagcagcgcttcatcgacccggccatggaacgcgcgcaggcgctgttcgccaagaaggtgcgcgacgagagcaagcgcccggccgtggccgcgcgcctgcgtgccgacctggaaggcaacggcgtggccgaggccgacctggtgatcgaggcaatcatcgagaaccccgaagccaagcgtgcgctgtaccagacgcttgagccgaagatgaagcaggacgccctgctgaccaccaacacctcgtcgattccgctggtggaactgcgcgaccacatccagcgcccggcgcagttcgcgggcctgcactacttcaacccggtagcgcagatgccgttggtggagatcatccatcacgacggcatggcgccggagaccgagcgtcgcctggccgcgttctgcaaggcgctgggcaagttcccggtgccggtggccggcagcccgggcttcctggtcaaccgcgtgctgttcccgtacatgctggaagcggccaccgcgtatgccgagggcattccgggcccggtgatcgacaaggccgcggtgaagttcggcatgccgatgggcccgatcgaactgatcgataccgtgggcctggacgtggccgccggcgtcggccgcgaactggcgccgttcctgggcctgcagatcccggccgcactgcagacggtggaaccggacaaacgcggcaagaaggatggccagggcatctacacctgggagaacggcaagccgaagaagccggacgtggccagcgactaccaggccccggccgatctggaggaccgcctgatcctgccgctgttgaacgaggcggtggcctgccttcacgagggcgtggtggccgacgcggacctgctggatgccggcgtgatcttcggcaccggtttcgcaccgttccgcggcggtccgatccagcacatccgtgcggtcggtgccgatgcgatcgtcgagcggttgaaggcgctgcagcagcgccatggcgaccgtttcgcgccgcgtcccggctgggacaaccccgtcctgcgcgaaccggtggtctgagttcatcggccgggcctgcggcccggcacccgcagaggcaaccgccgaagccagagccggagcaacagccggctctggcttttctgttaggcgggcggggcggtgtgggcttgcaggacacgccgtaaacccatccatgggggctcgatggcgccatccatggcgccaacggtcctgcaagcccacaccgccccacccagacagtttcccggtgacggttgctgaactgcgatggctggtaggtgtcgaccttggtcgacaccaggagcgaagcgaccggcgtttgattttgattttcttttttcttctccgtggctggacgcacacggaaactgtcagaggtcgggcgggtgggttgcgcaggaccgttggcgccatggatggcgccatcgagcccccatggacgggtttacggcgtgtcctgcgcaacccacccgcccggccaagcgcggcttttgatcttgcttccgccttcagcgccccccacagccacgaggggctgcgccgttggctggaacaccctgttacccatacggggcatgtgcccgtcacagctgcatgcgatgctcaccacctgatccctgccagtgagaacgcccgcatgaccaccatcatcgccccgcgcgtgcacgacatcggcggcctggaagtccgtcgcgccgtccccaccctgcaggcgcgcagcatcggctcgttcgtgttcgtcgaccagatgggcccggcactcatgcaccccggcaccgccatcgacgtgcgcccgcatccgcatatcggcctggccaccgtcacctacctgtggtcgggcgcgatcggccaccgcgacacgctgggttcggatcaggtgatccgtcccggtgacgtcaactggatgaccgccggccgcggtatcgcccattccgagcgcacgccgcagccggaccgcgatcacgacaacccgatccacggcatgcagacctgggtcgcgctgccgaagtcgcacgaggaaatcgagccggcgttctaccaccatgccgctgccaccctgcccgagcagcgtcgcaacggcgcgtggctgcgggtgatcgccggccgtgcgtacggcgaggaatcgccggtgaaggtgttcgccgacaccctcaacgtggcaatcgatctcgaccccgatgcggaaatcgatatcgacgacggccaccgcgagcgcgcgttgtacatcctcgagggcgacgcgcagctggatggcgtggatattcccgcgcagcacctggtgatccccgaagccggtgcacgaggccgcctgcgcgcgaagacgccggtgaaggcgatgctgttcggtggcgagccgctggatggcccgcgccacctgtggtggaacttcgtgtcgagctcgaaggagcgcatcgagcaggccaagcacgactgggaagccggccgcttcggcaccattccgggcgacgacaaggaattcatcccacttccgcagtactgaacatcgcgtgttgcacacatctgaaggtgtatccctgcacccggcgttgacgctacagtcacccgctgatcattgaaatgtgacataaatcacactttcgaccgtcaaaggagtgcaacacatgagcatgggtaaacgcttgtccgccgagttcctcggcacgttctggctggttctgggtggctgtggcagtgcggtgctggccgccaagttcggtggcgacggcaatccgctgggtatcggtttcctcggcgtggcgctggccttcggcctgaccgtggtgaccggcgcctatgcgttcggccatatctccggcgcgcacttcaacccggcagtcagcgtcgggctgtgggccggtggtcgtttcccgaccagggatctggtgccctacatcatcgcccaggttgccggcggcctgctggccggcttcatcctgctgcagatcgcctccggcgccactggcttcgccatcgatggcagccaggcgggtgcgttcgccagcaatggctatggcacgctgtcgcccggcggctacagcgtggcagccgccttcctgtgcgaagtggtgctgacggcggtgttcctgatcgtgatcatgggttccacccacggcaaggcaccggccggtttcgccccgctggcgatcggcctgtcgctgaccctgatccacctgatcagcattccggtcaccaacacctcggtgaacccggcccgctccaccgccgtggccttctttgccggcagcggcgcagtcagccagctgtggctgttctgggtcgctcccctgctgggcggcgcgatcggcggcctgatctacaagtggatcggcagcgaccgctgatcctcgcgactcccattgcggccgaccctcggccgcaatggttacttctgcaaccgcgaattgtgcgattgctcacgttccgttaaggttgagttgaccgtccgtgcacatgccggatggggcggcatccggggatgggatgccacggccgccggccctgctggcggagccaaacaactcatcaccttgggggatgcatgaagttcgtgcctgtcatcttgtcgagcctgctgttcgctgcggcccaggccgccgcgcaggcgccgtccgaatgtccttcgctgccagccagcagtggcctgcagtggcagcagcaggtgcaggccgatttcctggtctgccgcgccagcacccctgatggccgcgaagtactgagcctgatgctcagcgcgcgtgaccccgccattccgctgagccgctcgctgcgccaggaaaaaggcagcttcggcggtgaatcgctgtactggtaccagcccgacctgggcggccagcaaccgccgggttacgccgaacggcgcatcagcgtggtcaagatcgacaaagggcgttacgcgcagattgcgctgtatccggacagcgcgcaggagctgagctcactgcagcagctggcgcagggcatgagcctgaccccttcggccgtggccgccgggcgctgaaggtgacggggatgactgcctggcagcatccccgcaatgcacctcgatcggcaggcagtgccggccgccggccggcaaacccttcggtcctgatcaaaagcaggtgccggccggcggccggcactacctcagaacctgccttcctggaaatcgacgaaggcctgcatcagttcctgccgcgtgttcatcacgaacgggccgtgccgcatcaccggctcgcgcaacggacggccggccaccaggatcagccgcgcgccttcgctgccagccgaaacatgcagctgttcgccgccgcccagcaccgccagctcctggcgcgcaacatcacgggcggcgtcctgttcacccaccgtcagtccgccttcaaatacataggcaaaggcgttatggccttccggcagcgtgtaagtccaggcccggtcgggcgccaacgtgatgtcgagatacagcggctcggtggccggctgcacgatcgggccgcgggtgccgtcgaccgagccggcgatcaccttcacttccacgccggctgccggctgcaccacgggaatgcgctcgggcgcgaactcctggtacttcggctcggtcatcttctccttcgccggcaggttcacccacagctggaatccacgcatctgcccgctttcctgctcgggcatctccgagtgcaccaggccgcggccagcggtcatccactgcacgctgcccggggtcaacaggccttcgttgccatggttgtcgcgatgccgcatgcgtccgtcgagcatgtaggtgacggtctcgaaaccgcggtgcgggtgttccgggaagccggcgatgtagtcctcggcccggtcggtgccgaattcatcgagcagcaggaacgggtccaggtccggcagcgtcgggccgccgatgacgcgggtcaggcgcacgccggcaccgtcggaggtgggcatgccacggatggtgcgcagcacgcggaccggttcgggaaggctcatggcgactcctgtgggatggatgcccctgaagatggacgccacatggccgtacgccaatggatggcaccgcaaccaattgttccatccctgatgttggctgcacgtcagcgccaccgtcgtacgaccaaagtactaccgccgattcgtcctgtgccaattgaccctgtcgtgggcaagcaggactctttgactgtctttccgggagagagcacctcatgaaagggttttccaaactgggctgggcggcactcgccctgctcggcgcattctgtctgggcaccgtcgccctgcgccgcggcgagcacatcaacgcactgtggatcgtggtggccgcggtctcgctgtacctggtcgcctaccgcttctacagcctgttcatcgccaacaaggtgatgcagctggatccgacccgggccaccccggcggtgatcaacaacgatggcctggactacgtgccgaccaacaagcacgtgctgttcggccaccacttcgccgccattgccggcgccggcccgctggtcggcccggtgctggccgcgcagatgggctacctgcccggcctgctgtggctggtggtgggcgtggtgctggccggcgcagtgcaggacttcatggtgctgttcctgtccagccgtcgcaacggccgctcgctgggtgacctggtgcgcgaggagatgggccaggtacccggcaccatcgccctgttcggtgcgttcctgatcatgatcatcatcctggcggtgctggcgatggtggtggtcaaggcgctggccgaaagcccgtggggcatgttcacggtgatcgcgacgatgcccatcgcgatcctgatgggcgtgtacatgcgctacatccgccccggcaggatcggcgagatttcggtggttggcctgatcctgctgctggccgcgatctggtacggcggcaaggtcgccgccgacccggtgtgggggccggcgttcaccttcaccggcacccagatcacctggatgctgatcggctacggcttcgtcgcctcggtgctgccggtgtggctgctgctggccccgcgtgactacctgtcgaccttcctcaagatcggcaccatcatcgcgctggccatcggcatcctggtggtgatgccggaactgaagatgccggcgctgacccagttcgccgccagcggtgatggcccggtgtggaagggcggcatgttccccttcctgttcatcaccatcgcctgcggtgcggtctccggtttccacgcactgatctcctccggcaccacgccgaagctgctggccaatgaagcgcacatgcgctacatcggctacggcggcatgctgatggaatcgttcgtggcggtgatggcgctggtggcggcctcgatcatcgatccgggcatctacttcgcgatgaacagcccggccgccgtgatcggtgccgatgcagcctcggcggcgcactacatcaccaacacctggggcttcaccattacccccgagcagttgaccgcgaccgcggccgccattggtgaaccgaccatcctgcaccgcgccggtggtgcaccgacgctggcggtaggcatcgcgcagatcctgcacgaagcgattcccagtggcagcgacgcgatgatggcgttctggtaccacttcgcgatcctgttcgaagccttgttcatcctgaccgcggtggacgccggtacccgcgccgggcgcttcatgctgcaggacctgctgggcaacttcgtgccggccctgaagaagaccgagtcgtggaccgccaacatcatcggtaccgccggctgcgtggcgctgtggggctacctgctctacaccggcgtggtcgatccgttcggcggcatccagacgctgtggccgctgttcggcatctccaaccagatgctggctggcatcgcgctgatgctgggcacggtggtgctgttcaagatgaagcgtgaccgctatgcgtgggtcactgcggtaccggcggtgtggctgctgatctgcaccacctacgccggcttcatcaagatcttcgacagcaacccggcgcagggtttcctggcgcaggcacacaagttccaggccgcgctcgccagcgatacgatcactgcaccggccaagtcggtggcgcagatgaagcagatcgtggtcaacgcctacgtcaacaccggcctgaccgcgctgttcctgctggtggtcggcgcggtgctggtgtattcgatcaagaccatcctggcggcacgccgcaacccgcagcgcagcgaccgcgagaccccgtacgtggcgctgaagccgcatgaaatggtggatctgtgatgagcacgcaactggttcccgccggccagtaccaggcgcaccgccgcatctggcggcgcctggtgcagaccgcacgactgtgctgtggcattcctgattacgacaattacgtccggcacatgctggataagcacccggaccaggagccgatggattacaagacgttcttccgcgagcgccaggaagcgcgttacggcgggcgcaacggcgggcgctgctgctgagggccaggcctgcctttcagcaggcaaaagaaagccgagcgcgggctcggctctacacgggcagagcgggttcgcggcgcacgccgcgaacccgcaacaggatcgtccggccaggactcaggcgccggccatccacttcaggatcaggccggtgacatacgccagcccggtgccggtggcatagcccaccgtacccagcagcacgcccaccggggccagcgtcggatggaaggctgcggccaccacgggggccgaggcggccgcgccgatgttgccctgcgaaccgatcgcgaagaagaacagcggcgcgcgcagcagcttggctaccacccacagcaccagcacgtgcgtggccatccagatcgcgccaagcaggaacagccacggccgatccagcagcgacagcaggttcatctgcatgccgatgcaggcgatcaggaagtacaggaacaccgtgcccagccgcgaagcgcctgcggcttccagccggcgcgcacgggtgaagctcaggcccaggcccatcgccgtggacagcaggatcacccagacgaactggctgtcgaggctgaactggctggcccagctgacattggccttgaaccagcccgacaacggcgcggcgatggcatgggccaggccgacgccacccaatgccacgccaacgatcaccatcaggtcggtcatgctgggaatgcgcgcgttctgtgcctcgtaggcgctgatgcgtgccttcatctcgtcgatggcgcgggtgtcggcaccgttgcgggtatcgatctgctgcgcgcggttggccaaaaacagcaggatcgccatccacaggctggcgcaggccacgtcgaccaccgcgaactggccaaaggtggtggcatcggtgccgaacacctcgcgcatggccaccatgttggcgccgccaccgatccagctgccggccagcgcggccatgccggcccaggtatcaccggccaccgtttccggatggatcagcttcatcagctggaacgagacgatggcgccgagcatgatgccggcggtaccggcacagaacacgatcagcagctttgggccgagcttgatgacgcctttcaggtcgatcgacagtgtcagcaggaccagcgcagcgggcagcagcacgtcgcgcgcgaccgggttgtagagcgaggtgttgtggccatcgatgacaccggcggtgttgtagatggcggggatgaagtagcacagcagcagtgccggcacccaggcgaagatcttcttcaacaacggggtcggaccactggcggcccagaagatcagggccagggtggcggcaatcaggcccagtccaacgatgtcgttgctgatcagggcggtagcgggttcggtcggcatgggatcctctgtcgatcgaaagagcggagaaaaaaaagcgccgcatgaagcggcgcaggtcgagattaacattgtcttcacgcctggtcatgctgcgctgcttgtcgccttcccctgcattgacgacgattgcggcatcaccgttgtggagcaggcccatgcagcttggtgcgttctctgtcagcctgtccgtgaaggacctggccgcctcccgcgcgttccacgaagccctcgggttctcggtcaccggtggcgatcccacgcagaactggctggtaatgcgcagcaacggcacggtcatcgggctgttccagggcatgttcgagggcaacctgctgaccttcaaccccggctgggaccagcacaggcaggagctgccccacttccaggatgtgcgtgaactgcaggcggaactggatgccaagggcatcgaactggcagtccgcactgaccccgatggccaggggaccggctacctgcagctggccgatcccgacggcaacgtgatcctgatcgaccagcacgtggcgcggccgaacgggcggtaatgcgaacagccattgcgtgggcaggcgtcgaccttggtcgacgggccgcatgccaaccaaggttggcatctaccaggacggccggatcaggccgggcgcgaggcactgaaatcgagcgttacacgcgttccgcgcggctcgcagggctgcagctgcagggtccagcccaggtgctcgcacaaccgcgcgatcaggtccaggccgatgccgccgccacgatcggcgcgtccgccacgggccatgcgcgcgtggatggcggcaatctcctccgggctcatgccatgccctgggtcctgcagcgtcagcaccgccgacgcactcaactgcagctcgatatggccgcggccgctgttctcgatggcattgcgcagcaggttgccgatcgccgcctgcaccactgccatcggcgcaacgatatccaccggcgccgcctggatgccgatgctcaggtccttgtcaccgagcaggtggcgatggtcgtcgacgatctccggcagcagctggtccagggcgatgcgctcggcacgcgcggccaggcgtgccggatcacgcgccagcaccagcagcagctcgatcagctgctccacgctctgcgctgtgcgcaacacccgctgcatctgctggcgggcgcgctcgggcaggcccggttgctccagcgcgagctcggcagcaccggtcatcaccgcgatcggcgtgcgcagttcgtggctggcggtgctgatgaagacccgctcgcgctcgacgaactgctcgttgcggtccaggtagtcgttcaacgcaccggcgatggtatgcagctcagcgctgccgcgcggatcgacttcgatacgctggccctgcacgcccggccgcagcccggcaatgtgctgtgccagcaggctcaacggacgcaccatccgctccatgccgaacgacgccatcagcacggtgacgaagatcatgatcaccccggccagcatcacccagcgcgtggcgaactgttccaggtcatggaaatcggagatgtccagcgccagcgccacccgtcccatcgactgtgtttcacggaccatcaccgccgtctcgcggcccttgaccatcactccgtcatgcaaccccggatgcagggagcgcaggctctctggcagattgactgcgtcaaagcggtacaggctcagcgtgtccgagtcctgccagcgatagtgaggttcgtgctcgacatgctcgacgatgctgtccagttcggaattgagcagcgcgcgccacgcggcgtgctcggcgtgttcgtgcacgtagttgccgacactgaatactgcaatcgacagcagtgccaggtacccgagcaaccaccacaccacccgccggtacagcggccccggcttacgcgccctcatcagcattcctgcctgcgtcggcagcgtccatcagcgccaaccgatagcccacccgcggcagcgtatggatcagcttgtcggcaaacgggccgtcgacgctgcggcgcagctcgtagacatgcgagcgcagcagatcgccatccggtggctcgtcgccccacagggcgaactccagctgctggcgggtgaccgcaccggggctggcgcgcatcagcacttccagcagcttgcggcaggccgggtacaggtgcagtacctggccaccacgctgggcttccagggtcgccaggtccagcaccaggtcgcccacctgcaggcgcttgcgcggattgcggccctgcgcgcgcagcagcagcgcctccagccgcacttccagctcgggcagggcgaacggcttggtcaggtagtcgtcggcaccggcgcggaagccggcgatcttgtccggcagctcgtcgcgcgcggtcagcatgatcaccggcacctccgacgcgtgctcggcgcgcaggcgacgcagcacctccggcccctccatgcgcggcagcatccagtccaggatcaccgcatcgtaggggtggctgcctgccaggtgcaggccggtgatgccatccggggccacgtcgagcacgtgcccgcgcgactcgaaatagtcgaacaggttggccaccagctggcggttgtcctcgatcaccaacagacgcatgcacgaaagatccacggaagttcgtaccatggtagcgccgaccatgtcggaatgcggtcgccctgcgcccgctccgacgcctttcctaccccagccacgtcagagtggcggttttgctcccggagcctgccgtgcccgtagccctgccccgccgttggcgcctgcccctgttgtggctgctgatcatcgccgcgttggccgccggtatcggcctgcgccagccgcagccgccggacgagccgcgcttcgtgctggcggcccgtaccatggtcgaaagtggggaatggctgctgccgcaccggggcgtggagctgtacgcggagaagccgccggtcttcatgtggctgcaggcggccgcttacgaggtggtcggcagctggcaatggtcgttcctgctgccgacgctgctgggcgccctgctcagcctgtggctggtgtcggacctggcacggcggctgtggtcgccgcggcattccctgtacgccctcgcggcgctgttctgcaccctgcagttcggcctgatggccaagcgcgcgcagatcgacatggtgctggtcggcatgaccacggtggccctgtggggattgatgcgccacatgtgcgagcgccgcaacctgcccgcgctgtggctggccggtttcgccgctggcctcggcacggtgaccaagggcgtggggttcctgccgctgctgatggtgctgccgtggttcggctggtggctgtaccagcgccgccgcgggcgcagcgtggacggtccgcacccggcaacgctgctgtggctgatcccggccttcctgctgggcgtggcggtgtggcttgccccgctgggctgggcattgctgcatgagcccagcgcgtccctgcagtcctacgcccacgaactgctgttcaagcagaccggcacccgctacgccaacgcctggcaccaccgccagccggtctggtactacctgcaggtgatcctgaccttgtggctgccgggcagcctgctgctgccgatgctgttcaaaccctggtggcgccgcatccgccgtggtgactgccggcaatggctgctgttgggctgggcgctgctggtgctggtgttcttcagtgccagccccggcaagcgcgaggtctatgtgctgccaatgctgccggcgatggcgctggcggtggccccgctgttgcctggcctgctgcgacggctttgcgtgcggcgctacctgttcggctacaccgtggtgctgatgctggccaccggtgtgctcggggtgatgctgatgaccgaacatccgtgggccctggcgcagctggaacggcgggcgatgcccgattcgctgctgccggtgctgggagatggcctgctgacctttgccattgccctggccacgttgatcgtgtggctgcgggtgcgacgtgccgcaacgctggtgttgctgacccacggcatgctttggatgctctacggcctggtgctgatcccggcgctggatccgtacgcatcagcgtcggcggtgatgcgccgggtgggcgcgcggatcggcccggatgcggagctggcactggtcgcctggcgcgaacagaacctgctgcaggcagatcggccggtgcgcgagttcggcttcaagcgcccgtgggccgaacaatggcatgacgccggcccgtggctggccgaggcgccgggcaagcgctgggtgctggtgctggacgatgcgatgagcccctgcgtggacccggccaaggtgatcgacatcggcattgccaacaggaatcgttggcaactgcttcccggtacggcctgggacccgaagtgccacgccgagcgcaccggatcgaccgccgaagaagactgaacggtgacgcgcgccggggactcattaacccggcgcgaacgggcgtccgacccttctccgacatcgaggtgacgagcatgagcgcggattcccgaaccgccccttcccagcatgcccgttcgtcccattgatgcggcagcgccgcttgcgacatcaccactggcgtcaagattcgccgtaactcacttctggctgcctgtcgcaatcggtctgcccgtgtttacgctgctcatgggtttcggcggtgatcaatgggtggccgatcacctgttccgcctcgaaggtggccactgggcgttgcaggacgcctgggtcacccgcacggtggtgcacaaggccggcaagtggctgagcacgtcggcggcgctggtcgcgatcctgttgtgcgtgcaccactggcgcaaggggggcgatcgcaccctgcgatgggcgctgctttatgtcgtaattgccatggcgctgggtacgggcgtgatctccctgctgaagaccctggtgccgatggaatgtccctgggacctgctgcgctacggtggccatcagccctatatcgggcttttcacgcagcgcccggccggcatggccgcacaggcctgcttccctgccggccacgccagcgcaggctatgcgtggctgtgcctgtactatttcgccctgctgtggcgcccgtcatggcgctgggcaggcttgtggatcggcctcggcaccggcctggtgttcggcatcagccagcagctgcgcggcgcgcatttcctttcgcatgacgttgccaccgcgttgatatgttggctgctgtcactcggcctgtacctgatcgtcaaaggcatcctgatccgccgtcagctggaccgtcccaaccgccaggaggcaaacgcatgagtgcatcggtccaacgccccgcccgcccttccgcactggcgggtcttcgccactggcggccacagctgtccaccgaagcactgatcgccttcaccagcctgttcttcgcggtggccggcaacggcctgttctggcacagcgcgatggccagccatccgggcagcctgcgttacgcgctgtcgctgctgctgttgctgctgggtgcgcacggcgtgctgctgggcatcctggtctggcgctggaacgccaaagtggtgatcagcctgctgctgctggtgaccgcattcgccgcacactacatgagccgctaccacatctacctggatgcggacatgctgcgcaacgtgctggcgaccgaccccaaggaaagccgcgagctgatgacggtatcgctgctgtggccggtactgctgctggcagtgctgccgatggtggtgctgtggcgcgtgcagctgcgccgccgcagctggggccgcagcctgctctggcgcgtcggcttcctggtggtggcggcagtgacggctgtcggcggcgcgttgatctcgttccaggatgtctcggcactgatgcgcaaccagcgtgaagtgcgctatctcgcgacaccggccaatgtcctgttgggcatgccgcgtgcattgcgtggcgacaatccggtgcagcgcgcgccgaagctgccgatcggcaccgatgccaaggccaccccgcgcgcgccggccagcaagccgcgcctgctggtgatcgtcatgggcgagaccgtgcgtgcgcagaactgggggctcaacggtggccgcaacaccaccccggaactggcgcaggccagcgtgatcaatttcccggacatgcattcgtgcggcaccagcaccgaggtttcgttgccgtgcctgttctcgccgtggggccgccatgactacgacgagaagaagatccgcgcgcaccagtcgctgctgcacgtattgaaccgtgccggcatcgcaccgttgtggcgtgacaaccagtccggctgcaagggcgtgtgcgaaggcctggacttccagtcgctgtccgatgccaccacgccgggcctgtgcgccgatggccgctgcatggacgagatcctgctgcaggacctggccacccaggtacgcgccaggcccggcgaccgggtggtggtgctgcaccagctgggcaaccacggtccggcctacttcgagcgctatccgcccgcattccgccgtttcaccccgacctgcgatacccgtgacattggccgttgctcgcgcgaagagatcaccaacagctacgacaatgccgtgctgtacaccgatcacttcctgacaaagaccatcggcacgctgcagggcatgcaggattacgacacggcgatgatctacctgtccgaccacggcgagtcgctgggcgagaagggcctgttcctgcacggcgtgccctacgccatcgccccggccgagcagacccgggtaccgatgacgatgtggttctcgccaggcttcgccagcagccgtgggctggacctgcagtgcgtgcgcaagcgttcggcggcgtataccgaccatgacaacctgttcccgtcggtgctgggcctgatgcaggtgaagacctcgctgtacgaacgcgaccgcgacgtgttcgccaactgcgagagttgaggggtgttcggcagggcttgcagccctgcacctgcaggggcaacggccgaagcaacagcaacagcgtgcattccgtgggatggtggggtgggtccggtggcgggagacgccgtaaacccatccttgggggcttggccgcggcatccatgccgcgaacactcccgccaccggacccaccccgccttcgacagttttccgcgatctgttggaacgatcttggggtcagatccgttttccggaggaaaacggatctgaccccattttgattgtcgatacctgacagatgtgtcgaccaaggtcgacacctaccaacagccgccacgatctgtcagaggtggggcggtgtgggcttgcaggaccgttggcgccatggatggcgccatcgagcccccatggatgggtttacggcgtgtcctgcaagcccacaccgccgcgccatcccacggataccccgctgttgcggttgcttcggcggttgctgttgcttgtgctctggcctctgcgggtgccgggcgccgcccggccgacttccgccacttgcggaggcagcggctgcccactagccttcggccgtcgttcaccacccaaggaccgcccgtgaaacaccgtcatctcctgctggcctcggcaatcgccgccgccacgctggccctggccgcctgcaagaaggaagctgccccaggcaccgataccgccagcagcagcgccccggccggcgaaaccgccgaccagttcgtggcccgcatcaatgccgagttcaaggccgcctacccggagatgacctcggcgcagtggctgtcctccacctacatcaacagtgattcggaacgcatcgcagccaaggccaacgagcgctcgctgacccagctcaacagctggatcgaacaggctgcgaagttcgacggcaagccgatgagcgaggacagcaagcgcgcgatccacctgctgaagctgatgtcgtcgatgccggcaccgcgcgacccggccaagctggccgagctgacccagatcgccacccgcatggaaggcagctatggcgccggcaagtactgcaccgatgccaacgatccgaactcctgccgccagctgggcgagctggagcaggtgctggcacgcagccgcgactatgacaagcagctcgacgcctggcagggctggcacagcaccaccaagaacatgcgcggcgactaccagaagttcgtcggcctggtgaacgaaggcgccaagggcatgggcttcaccgatgccggcgagatgtggcgcagcggctatgacatgccgccggagcagatcggcccggaaaccgaccgcctgtgggaacaggtcaagccgatgtacgagcagctgcactgctacgcacgcggcaagctggacaagacctacggcaaggacaaggccgaagtgggcaacggcctgatcgccgcgcacctgctgggcaacatgtggcagcaggactggtcgaacctgtgggaccagctggaaccgtacccgggcgccggcagcctggacatcaccgcggcgctggagaagcagtaccagaccaacctgagcgcggcgctggccaaggccggcaaggatgccaacgtggccgcgcagtacaaggcgcagcgcgaggccgaactgcgcaccgccaagcagatgaccgaacgcgcgcaggacttctacgtgtcgctgggcatgccgtcgctgccgcagtcgtactgggaacgcacccagttcatcaagcccgatgaccgcgatgtggtctgccacgccagcgcctgggacatgaacatggaaggcgacgtgcgcaccaagatgtgcatcaagccgaacgaagagaacttcaccaccatctaccacgagctgggccacatctattacgacctggcctacaacccgctgccgccgctgttccagggcggtgccaacgatgggttccatgaagcgatcggcgacaccatcgtgctggcgatgacccccaagtacctcagctcgatcggcctggtcgatgcgccgaccgaaagccgcgaagcggtcatcaacaaccagatgcgcatggcgctgtcgggcgtgtcgttcctgccgttcgggctgatgatcgaccgctggcgctggggtgtgttcgatggttcgatcaccgccgacaactacaacaaggcatggtgggacctgaaggccaagtaccagggcgtggcgcctgccagtacccgtggcgaggagttcttcgatccgggcgcgaagtaccacgtgccaggcaacaccccgtacacccgctacttcctggcgcgcatcctgcagttccagttctacaagggcctgtgcgacgcggccggctacaagggcccgctgcatgagtgcaccttctacggcaacaaggaagccggccagaaatactgggcgatgctgagcaagggtgccagccagccgtggcaggccacgctgaaggagctgaccggcaccgacaagctcgatgccggcccgatgatcgagtacttcacgccggtcaacgagtggctgaagcagcagaacgaaggccagatgtgcggctggcaggccaacgcggcaccggcggcgaaatgagaaaaggggcgggtccgcaaggatccgccccttcctggtagtgccaggccgctggccggcaaccacgcgatgaagaccccgcgggcagccggccagcggccggctctaccggaatgcctgtcagctgtccttcttcgccgccatcgccgcggccaggtccgccttgaactcctcgaaggtctggcccttttccttcgcttcggcctgtgcggcgtcgcgcagcgcatcggagtacatcaggcgcaccggcgtgccgttgcgctcgtgcagttcaccggcctgcatgatcagcgccagtacctgcgcggcggagtcactgtggccggcgatacggccgtccatgcccagcacccattcgccatcgcggcgcacgacaccggccagcagggtgcgctgcgcgtcgcgcagttccgcatgcggctccaccggcgaggcctgggcagcggccttgttggcggcctgcttttcctggcgacggcgctggtcgcggcgggtcttggagctggtggacatggtgcggtaccgctgcgaggggggcgcaaggatagcgcaccccgcccgccacaccgcttcacaccccctcagtccaacactttcccgtgccgccagtaacccatgaaggtgatcgtgcggcggtccagcccgcactcgcggaccagatggcgacggatcgccatcaccgctcccgcctcgcctgccacccaggcatacagcggcccggccacgctggcatcggcctgttcccagaggatctgcgcgtcgacgtcgatctcttccagttcttcgccagcgaccacgctcgaggcggccaggcgcgcctgcaccgcctgcaacagaggcgccccgtacgccgcccgcccgcgcggcaaccagaccagctcggccgtggccggcgccttcaggcgaaccgcatcaccggcctgcgccacttccagcagggccagcgtacgcggcggatccaccctggccgccagttcctcgagaatcccggccactgccggcagcgcggtctcgtcagccaccagcagcacctggccaacgccggccggcggcttccattcccagccctcgctgctgtcggcgcagtcggcatccggggccagcagcaccacgcggtcgcccggccgtgcatggatggcccatcgcgaggccggcccggtctcgccatgcagcacgaaatcaacatcgacctcgccctgctctgcacgcagctggcggagggtgtaggtgcgcatcggcgggcgctgatcgtccggcagggcccgatagcgtgggtaccagtcctcgccgctggggacctgcggcgcctcctggccgggcaaggggaagaacaccttgatgcgctggtccggccctccggtcgtcatccgcgccacgtcggcaccggtgaacaccatgcggtccagggaaggggaaagaacgcggcgctccttcagcgccacctcgaacaggcggtaggtctgctgcgcagccatggggaacctcatgcaacgacagtggatcggctggctgtcgtgcacctgtgcaccggctggctggagtgcccagcctagtccggcggtttcccgccgcaagcgttgcgggcgccacggcccgccctacccctgcgcgctgctcagtgacccgtgcaggctgcctgcgccgcgcgttcgcgccggtgttcccagtaccagaacacgaagccggcgccgaagaacccggcctggcccaacgccaggtgcagcgggctggcgctgagcagcggcgacaccacgccggccaccacggtgctgatcatcagctgcacgaaggcctgcagcgacgaggccaggccgcgctggtgcgggtacatgtccagcaccgccagcgccaggatcgggaagatcagcgccatgcccatgccacccaggaagatcggcagcaccgcccacggcagcacgaactgcggcgccagcgccacgtagccgacgttcagcagcaccgacagcgcgcacaggccgaaaccaatggatacctggcgggtgggcgtggtgtgcccggccatgcgcccggacaggaacgagccggtggtcatgccgccgatggtggggatgaacagccaggcgaaaccgccctcgcccaggtgcaggtgctgcatcacgaacaccggtgccgaggagatgtacaggaagatgccaccgaaaccgatgctgccggccagcgccaggcgcaggaagcgcggattgaaaccgatgcgcacgtaatcacgcatcagcacccgcggcgacaacggaacgcgcgcttcgagcggatgggtctccggcaggtagcgggcggtggccgccagcagaaccagtgcgaacaccaccaggaaccagaagatcagcggccagccagcaccgctgagcaggatccagccaccgatgatcggcgcgatcgccggggcgatgccgaacagcatcgacacctggctcatcagccgctgcgcgtcgtgaccgtggtacaggtcgcggatcaccgcgcggccgacgatcatgccgacgcctgcggacaggccctgcagggcgcggaaccccagcagcgtggtcagatcggtggacagcgcacagccgaccgaggcgccgacgaacaccaccaggccgccgaggatcacccgcttgcggccccaggcatcggacagcgggccgtgtgccaggctcatcaggccgtagaacagcaggtacacgctgatggtctgctgcaccgccacctcgtccaccgccaggcgctgggccagctgcgggaacgcggggaagatggtgtcgatcgagaacggaccgaacatggccaggccggcgagcagcagggccatgcggcgggtggaaggagcaacagcggcggtcatggagaaggcgtccggcagggccatgcgcggcacgcacggcgggcgccagtcccctgcagtagggacggcgccagatgaattcgggtatccgcccatcataggtggggattgcgcctgatgccatgcagcagtgcacaaaacgcacgggcgggccatcggccattcaggcgccgcggccgggcccgcaggcggctggcgcgcccgcaacgggctataatcggcgggcaacacggtgggagaagcggaacaccgctgccgaaggcgcaacgcccgtaatcgctcaggcccgataccacccgtaacacaactctggagagaccggttcgatccggcgccgaaggggcacgaagccgcggttttccgcgcttccaaactctcaggcaaaaggacagaggggcgccccgcagaccgccgaccggcggcttgtgcccgtgcgtgtgccctttcctgacggatccttcgccatgtcccagaacaccccttccctgcgtgagctcgagcaccacaatgcgttcgtcgagcgccacatcggccccaacgatgccgagatcgcgcagatgctcgacgtcgtcggccacgcgtcgctggatgcgatgaccgatgccatcgtaccggccaagatcaagtcgccggcgccgctggcactgccggaatcgatgaccgaagtgcaggcactggcgaagatccgtgcgatcgccgacaagaacaccgtgctgcgcagcttcatcggccagggctactacggtacccacacgccgaacgtgatcctgcgcaacatcctggaaaacccggcctggtacaccgcctacaccccgtaccaggccgagatctcgcagggccgcatggaagcgctgatcaacttccagaccctgtgcgccgacctcaccggcatggaaatcgccaacgcctcgctgctggacgaagccaccgccgcagctgaagcgatgaccctggccaagcgttcggccaagtcgaaatcggacaccttcttcgtgcacgacgccgtgcacccgcagaccctggaactgctgcgcacccgcgccgagcccatgggcatcgtgctgcgcgtcggcaccccggccgaggcactggaagcagaagccttcggcctgctgctgcagtacccggacaccttcggccagatcggcgactacaaggcgctggtcgaggccgtgcacgcgcgcggcggcctggtggccgtggccaccgacctgctggcgctgaccctgctggccgccccgggcgaatggggtgcggacatcgtggtcggcaacagccagcgtttcggcgtgccgttcggcttcggcggcccgcacgccgcattcatggcctgccgcgacgcctacaagcgctcgatgccgggccgcctgatcggcgtctcggtcgatgcccagggcaacccggcctaccgcctgaccctgcagacccgcgagcagcacatccgccgcgagaaggccacctccaacatctgtaccgcacaggtgctgctggcggtgatggcctcgatgtatgccgtgtaccacggcccggaaggcctgacccgcatcgcccggcgtacccaccgcctggcctcgatcctggccgccgcgctgcgcgaggccggcgtgcaggtcggtggcgacttcttcgatacgctgcacatcaccggcgtgcatgccgatgagattcacgccaaggcccgcgccgccggttacaacctgcgtgcgatcgacagcgactcggtcggcatcagcctggacgagaccgccacccgcggcgacgtggtcgcgctggccgccgtgttcggcgcgcaggccgacatcgatgcgctggatgccagcaccgccgacgcactgccggccggcctgctgcgccagtccgcgttcctgacccatccggtgttcaacacccaccacagcgagcacgaactgctgcgctacctgcgctcgctggccgacaaggacctggcgatggaccgcacgatgatcccgctgggctcgtgcaccatgaagctcaacgccaccgccgagatgatcccggtgacctggccggagttctcgcagatccacccgctggtaccggccgaccaggcgctgggctacaaggaactcatcgacacgctggaagcgatgctggtcgaatgcaccggctatgacgcggtcagcctgcagccgaactccggcgcgcagggcgagtacgccggcctgctggcgatccgcgcctaccaccgctcgcgcggcgaaggccaccgcgacatctgcctgatcccggattcggcgcacggcaccaacccggcctcggcgcagatgtgcggcatgaaggtggtggtgaccaagaccgatgccaacggcaacgtcgacgtcgaggacatccgcctcaacgccgagaagtacagcgaccgcctggccgcgatcatgatgacctacccgtccacgcacggcgtgttcgaggaagaggtggtggagatctgcgagatcatccacaagcacggcggccaggtgtacaccgacggtgccaacatgaatgccctggtcggcgtggccaagccgggcaagtgggggtcggacgtttcgcacctgaacctgcacaagaccttctgcatcccgcacggcggtggcggcccgggcgtcggcccgtgcgcggtcaaggagcacctggccccgttcctgccgggcaagctgggtgacaacggcccggtcggcatggtcagcgcggccagcttcggcagcgcctcgatcctgccgatcagctggatgtacatcgcaatgatgggccgcgacggcctgcgcaaggccacccaggtcgcgcagctcaacgccaactacatcgccaagcgcctggccccgcacttcaagaccctgtacaccggccgtaacggcctggtggcgcacgagtgcatcctggacgtgcgcccgctggagaagaccagcggcatcggtgccgaggacgtggccaagcgcctgatcgacttcggcttccacgccccgaccctgagcttcccggtggccggcacgctgatggtggagccgaccgagagcgaatcgctgcacgaactggatcgcttcatcaacgcgatgatccagatccgcgaggagatcaccgcgatcgaagacggccgcctcgaccgcgaggacaacccgctgaagaacgcgccgcacactgccaccgcagtgaccgccagcgagtggacccacgcctacccgcgtgaactggccgccttcccgctggccagcctgaagcagagcaaatactggccgccggtggcgcgtgtcgacaacgtgtacggcgacaagaacgtgatgtgcgcctgcatcccggtcgatgcctacaaggatgatgaagtcgaggcgtgattcctcactgcatcggtaaagaaaacggcccgcgcaagcgggccgttttcatggggcgtgtggaccaaggcccacacccacaagcatccgatcacgggtccggcatctgccccaggctcaactgccacgacacgccaaagcggtcctgcacccagccgtagcgattgctgaagtcatagtcgcccaccggcatcaaccaatggccgccctcacccagcacgcgtgccgcgcgctcgaactgctcggcaccggaacactcgacgaacagcgagatcgacggcgagaaggtgaaatcgtgcacgtccaggctgtcgaagcacaggtagtgggtgccaccgagcaggaagatggcctggcggacctgccccggcacgccggcgccggccccctcgggatggcgttgcagggccagcagccggaaatcggcaaaggcttcggcgtacagggccagcgcggcctcggcctggccggtgaacatcaggaagggacggctgcgcagcatgcggtactcctggtcgacgggccgatgacggcctgcctgcacagtgccacgcggagtgtgtgcctgttgtagagccgagcccatgctcggctggcgatcgcgcaaacagcagccgaccgcagggtcggctctacagaatcacgcctggcgcatgcgccgcgcgatggcactgctggcggcgatcgtggcggtcaacgccaccatcgacaggaactgcaggcgggtgtgcgactcactcagcagcaggccgaagatcagcgcaaggatcgccagtgcacagcaggtcagccacgggaaaccggccatgcggaacggcagtcgggtacccagacgatccgcgcgacgacgcagcaccagctgcgagaccagcgacagcgtccacaccagcaggcaggtggaaccgacgatgttcagcagcaccggcagcacccggtccgggaacagcagttccattaccgtggcggcaaagccgaacagcacgctggccagcacggcgatcaccggcacctggcgcgggtcggtccagccaagcacggccggcgcttcgcgacgctgcgccagcgaatacatcatgcgcgaggcgccgtagaggttggcattgagcgccgacagcagcgcgatcacggcgatcagcgtgatggcggtaccagcgcccgggatgcgggcgatgtccagcacggcggcgaacggcgacttcagcgcctcgctggtccacggcaccacggcgatgatcacgctcagcgagccgatgtagaacaccaggatgcgccaggccacggtgcggatggcacgggcaatgctgcgctcggggtcttcggtttcggccgccgccacggccacgatctcggtgccgccgaaggcgaacaccaccaccagcagcgccgcgccgatcccggccaggcccttcggcgcaaaaccaccgtgttcggtgaagttgctcaggcccggggaggtcacctgcggcagccatcccatcagcagcgccacgccaatggcgatgaacgccaggatcgccgcgactttgaggatggcgaaccagaattcgaactcgccgaagttcttcactccgagcaggttgatcgcggtgaagaacagcatgaacgccaacgccgccatcggtaccggtatcgccggccagaccgtggccagcagcccggccgcacccactgcttcggcggcgatcacgatcaccagctgcacccaccacagccagcccacggtggcaccggcggtagcgcccatggcgtcggctgcatacaccgagaacgcgccgctggtcggtttggccgccgccatctcgcccagagcgttcatcacgatgatcaccagcgctccggcgaccagatacgacaccaggaccgccggaccggccgcctgcacacccacgcccgagccgaggaacagcccggcgccgatggcgctgcccaggcccatcatgatcagctggcggggcttgagcgaatgtccgaggcgggacggcgaagcggtcggaatcgagttgggcatcggcggggctggcggcgggctacaggggcgacaccttaccctgtcccgtgcccacggggataggcacagcgcagcaggccgctcaggccagcgccggctcgccgacgttcccaccgacacgggcacgataggcacgcggcgagaaaccggtttcagccttgaacttgcgggtgaaggcactctggtcgctgaaaccgcaggcctggccgatgcaggcgatgctgtcgtcgccatgcagcagatgcatggccatctggatccgcagccgggtcagcacctgctgcggggtcatctggaacaccttgcggaagctgcgctccagcttggacagcgaaaagccggtgatgtccagcagggtctgcatgcgcacgttctcggcgtagtgcgcgttgaggtgggccagcgccagccgcagctgctcgtactgggtgccgaggctgtccttctggccaaggtcgcgggaaatgccgatcaggccctcgatggccccgtcgaccaccagcgggcgcttgcaggtcaggcaccagcccggttcgcggttggcgaacaggtgcagctccatcaggttctcgatcacctcaccggacagcacgcgggcgtcctggtcaacgtagtccgcactgaggccggtcgggtagatttcggccgccgtacgcccgatcacgtccttgcgcgcgcgcagacccagccgccgcagcatggtctggttgacgtgggtgtaacgcccctggcggtccttgatgaagaacagcacatccgggatggcgtcgaacagggcttcgatgtcggcgggctcgactcgcatgcggcaagcatacccgagcctgcttttgcccgtacgttcacctttgccggaccgtggtttaacggggctggttccagtgtcgtggttccttttgatgatccggagccaacgtccatggccgccagcaagccgaccggcaagcgcgcaaccgtccctgccgaaagccaccgccggggcgatggcgatgaactgcaccagcaggccgggggcagccatccggcaatgaccaccgaccagggcattccggtggcggacaaccagaactccctgcggcagggacctcgggggcccacgctgctggaggacttcatcctgcgcgagaagatcacccacttcgatcacgaacgcattcccgagcgcatcgtgcacgcacgtggcagcgcagcacacggctacttcgagctgacccgatcactggcagcccatacccgcgcacgcatcctgaccgaggtcggcgtgaagacgccggtattcacccgcttctcgaccgtggccggtggcgcaggctcggtggataccccgcgcgacgtgcgcggctttgcggtcaagttctacaccaaggagggcaactgggatctggtcggcaacaacatcccggtgttcttcatccaggacgcgatgaagtttccggacctggtgcacgcagtgaagatggagccggaccgcgccttcccgcaggccgcgtcggcccatgacacgttctgggacttcatttcgctgatgcccgaatcgatgcacatgatcatgtgggcgatgagcgaccgcgccatcccgcgttcgctgcggatgatcgaaggcttcggcgtgcacagcttccgcctgctgaacgaggctggcgagtcgacgttcgtcaagttccactggcggcccaagctgggcattcagtccacggtctgggacgaagcgttgaaactgcaatcggccgacaatgacttccatcgccgcgacctgttcgaggccatccagcgcggcgactttcccgaatgggagctggcggtgcagctgttcaccgaagaagacgccgacgcattcccgttcgaccacctggatccaaccaagatcattcccgaatcgctggtgccgttgcaggtgatcgggcgcatggtactggaccgctggcccgacaacttcttcgcagagaccgagcaggtggcgttctgcccggccaacgtgccgcccggcatcgacttcagcaacgacccgctgctgcagggccgcctgttctcctacctggacacccagctgctgcgcctgggcggcccgaacttccaccagatcccggtgaatgcaccgaggtgtccgtttgccaatcatcagcgcgacggccacatgcagatgcaggtgcccaagggccgcgtcgcctacgatcccagctcgctgcaggacgacaccccgcgcgagacgcctgccggattccgcagccatgccagcgccgacgatggccgcaagggccgcacccgcgcggagagtttcgccgaccactacagccaggcccggatgttcttccgcagcctggaaaagccggagcaggcgcacctggcatcggcgctggtgttcgagttgtccaaggtggaaacgctgaaggtgcgggtgcgcaccgtcagccacctgcgcaacatcgatgacgcgctggcgcagcgcgtggccgatggcctggccctgcctgcgctgcccgacccggccccaaccgccacgccggtgcgggacatgccgcccgctcccgaggtgcgcgtgatcgggcgtaacaagcccaccctgcagggtcgctgcatcggcatcctgttcgacgaaggctccgacgcgcgcgtgattgccagcctgagcaaggccgcccggaaggcaggtgcagacgtgaagctggtcgcgccaaaagtgggaggcgccacgctgagcgatggcgcattgcaggcggcagatgggcagctggcgggcaccccgtcagccgtgttcgatgcagtagccgtggtgctcagccttgaagccgcgaaggccttgtcgaaagagagtgcagccgtcgaattcgtcagccaggcgtgggcacacctgaaggccatcgccagcgacgcgggcggccaggtgctgttgaaggcggcgcgcgtcggcaacgaccccggcatcgtcgaagcagaagacgccaaggcattcctggcggcggccgccacccgccagtgggcgcgcgagcccaagctgcgcctgctggcctgaccacaacgacaggagaatcgtcatgccccgtggtgacaaatccgcatacaccgaaaagcagaagcgccaggccgagcacatcgaggaaagcgaacgtgatcgcggcgcgagtgaaggcaccgccgaacgcattgcctgggccaccgtgaacaagcaggacggcggcggcaagcgcgccggcagtgcccgcaagggcgcgaagaaggcgaccagcaagaaggcggccaagaaggcgcctgccagaaagtcggccacaaagaaggccgcaaccaagaggacggcggcgaagaaggcacctgcgaagaaggcggtggcgaagaaggcaccggctcgcaagaccgcgacaaagaaggccgcaaagaagacggcgaagaaggcagcggtaaagaaggcgggtacggccgccgcgcggagcgccgccgcgaagaaggcagccaagacgcgggccgcgaagaagaccgtgcgcaaggcggcggcgaagaaagccgcgcgcacgcgtgcacgcggctgagtcttcgatcaggaggggagcgccctcatccatgcggcaacttcggctgcggctgcctcggcacgggcctgcagcagtagatgcggcccttccagcgatacgtgccgggcatcgggcaacaagacctgcagctcggccacgctgggcggccacaacaggtggtcctgtcgtgcatgcaggcataacgtcggcagcgtgagcttcggcaactgcgcgcggacatcgatctgcagtgtcgccgcagcgcgctgccgcaggatcgcggtcggtaccgcagcgatcgcatgtcgcagctcgcgaaggttcatgcgtgtccgccaatgccccagcagaagccgggccagcaacgccagcggcggcagtggccatgcaggggcaagcaagcgtgcgctcgccgctggcagcggcaccggtcgccgcgcgaaggtcgtactcagtatcaatccgcgcaaccccggcggtgaagccaccgccagttcgatagccagcggcccggcaaacgattcagccagcagcacaaagggagagatgggaagctgcgcgcgcaggatcgacgccaatgtgacgtagtcctgtggcccgtgcatgggcagcggcagcacctgcacggtaaccccgtggtcctgcatcgcttccacgaagcatgtcgacagcaggccgctgccatccagcccgggcagcatcacgatcgggagcatcacggcgttcatcacattgctcacttctcaggtcccttcgcacgactcgctgccgcgcagcttcgcttatcggctcgacccagggaagtgcacgccgctggtcgcggcgctaccctgatggccccggacagacgaggaaggcggcatgcgcaagccacgctggttcagctggaccggcattgccctatgcgcgctctatctcgcgcttaccacctggctggtgctcgatgcccggtccaacagcgaccccaagagcgcctacatcctcatgcaactgccggtgatgctgcagaccgcagcactcaacgtcatcggcgtgggacgctggctttccggaatgacctggatcaccgtctaccttctggtgattcctcccacgcttggcgtgctgtacgtgcttggggccatgctcggcagcgtcctggagcaatgagggcgatcctccctgctgcctgagcgggcgatgcaaatacggccgcccaaggcggccgtattcctgtcacggggtcagcagcctgctcaggctgcacggcgcggcacggccgaagccactgcgccttccaccttgaataccgccaccgacgtggtcaacgcatgtgcctgctcctccaacgcgcggctcgccgcggtggcttcttccaccagggccgcgttctgctgggtcacctggtccatctgcaccaccacctggttgacctgctcgatgccggcggcctgttccttgctggccgctgcgatgtcgctcatcagctgggtggtgcgcgaactggcctgggccacgcgtgcgatcgctgcttccgattcaacggtcaccgccaggccactcttcaccttggcagcagcgtcttcgatcagctccttgatttccttggccgcgacgccggcgcgctgcgcgagcgtgcgtacttcgctggcgaccacggcaaaaccacggccctgctcgcccgcgcgcgcggcttccaccgcagcgttcagcgcgaggatgttggtctggaacgcgatgccgtcgataacggtggagatttccgagatgcgtgccgaggactgatcgatctcacccatcaccgaggccatctgcgccatcgcctgctcggtctcgcgtacggcggcaccggcggcatgcgcttcgctgtcggcctgacgcgccagctcggcgttctggcgcacggtggaggtcagctcctccatcgacgcggcagcttcctccaggttggccgcctgctgctccgtgcggcgcgacaggtcgttgttgccggcggccagttcctgggccgcgttgttgatgctgtcggcagccacctggatgccccgcacaatgcccgtcagctgcgcggtggtggtattggcgtcgtcgcgcatgcgcgcgaacacgccgtcgtactcaccgtccatgcgtgcggtcaggtcaccgtgcgagatcgcgcgcagcacgtcggaaacatcggcaatgctggcctgcgaactggccatcatgccgttgaggtgttcgaccatcgccttgaactggtactggaacgcagcagcatcgccacgcatgctgaagtcgccggcgcgagccgcacgggccagttcatcgatctgcgcgttgatcgccatcaggctctgctttaccgcggccagagtgcgggtcagcgtgcccttctcgcccgggtagtccggcaggtcacggctgaggtcgccgatcgcgtaacgctgcatcacttcggccatcagcagctccacctgcacgtgcgattcgaccaggctgttggtggcctgcaccatgcggccgaaatcaccggggaaggcactgtcgtccatgcgatagcggatcgcacccgcttcgtgctgctcagccatctgcagctgcgcgccgatcgccgcctgcacgctctgccgcacactggccatggcctcgcccagctgggtcagttcatcccggccaccgaggcggaactcctggtccagctggcccttggacagccgctcggccaggttcaccgcgcgcgccagcgggccggtcaggctgcggccgatcatcaccgaggcgccgatgccggcaagcagcgcgacgccgcccagcaccagcagctgcagcaggctgcgttcgcccaggcggatcgcttcggcggcagcttcacggctttccttctcctcgaagtccacgccatcggacagcgccttgttccagccgttggccgcttcctgcaccgggcccagcgtcagcgccacggcgccagggtaatcaccctgctccatcagttcgctggtctgcttgttgagcgggcgcgcaacggcacgcttggccgcgatggtttccgcgatggtcttgccttgggcatcgctgggcagcgcctggtaggcggtccagctggcctcatagcgcttgaccaggtcggcgatgcgcttctcgtcgctgccgcggtcttcgccctgacggatcagcatttcgcggcgcacgaccatcatctggttgttggcatcgagcatctgcgacagcaggcgcaccttggccacgctgacgtcgaccacctgctgcatcgcgcgcttctgcacgacactggcagtggcgccggtggccaccacggcggcgaccagcagcagcaacaggccaaagcccagcccaagacgccaggcaaccctgacgttcctcaagtagttcatcggtacatccaaaacggggggatgcgcccttatcggcggcacggcaggcaatcttgatcgccctccatcggtggcttcggccacggttcaccttggtgagtccccgtcccagcggcacctgccgctggcaatcggccgcaatgacatgcctgctcatgcgggcatcagatccctttcacggcggctcggcgctgtctgcgggcaaggtggcggcgtacctgctggagatcccaatgccctcatctgtgtcccgatccaccctgctcgcactctcgctgctggcgtcgccggccttcgcgcaggtgccgccgcccaacctgcccgcccccattgccgagaaggccgacccggacaccgcagtgcgctccgcactgcatgcccaagtgctgctggatcgcgcgaatttctcgcctggccagatcgatggcgaagtgggcagcaaccagcgacgcgcggtggcgggcttccaggccgcgcatgggctgaccgtgacgggtgagctggacgacgccacttggaaggctctgcaggctgatacggtggggccgctggccagctacacgctgactgccgaggatgtcgccggcccgttccagcccataccgaaaggacctgccgcacaggccaaactgaaatcgctgggtttcagcagtgtggaagaagccctgggcgagcgcttccacgcctcgccggagttgctgaaggtgctcaatcccggcgtggatctgaccaaggctggcagccgcatccaagtgcccaacatcgcaccagcggcattgccgaaggcggcgaagatcgtggtcgacaaatccgactccaccctgcagttgctggatgcgcagggcaagctgatcgcgcaggtgccggtgtcgtcgggcagccagcacgacccgttgccgatcggcgaatggaagatcctgggcgtgtatcgcgacccgccgttccactacaacccgaagttgttctgggatgcgcgcaagggcgaaaagaaggcgacgctgccaccgggcccgaacaatccggtcggccgggtctggatcgacctgtccaagccgcactacggcctgcatggcacacccgaacccagccacgtgggcaagaccgaatcgcatggctgcgtacgcatgaccaactgggatgcggtgcgtgtggccgacgcagtggatacttcggtgcccgtggtgatgcaggagtaagcccatgcgtctttcgcagctgatcgtattgggcgtactgctgggactgggggcaggttggtggctgcgtcgcgatgggagtgagccggtagccgcctcgctgccggcagcgccatcggcggtgtccgccgcgccggtggtcgaaccagcgccacgcgcaacggccccatccgccaccaccgcgccgccggccgcgcaggctgcggatgcaccgtccggcctgctgctgccggtgcagggcatcctggcctcgcagctgcgcgataccttcaccgatgcacgcagcgaaggccgcgtacacgatgccatcgacatcatggccgatgcaggtactcccgtactcgcggtggctgatggcacggtggaaaaactgttcgacagcgaacgcggcgggctgacgatctaccagttcgagcccagcggacgctggtgctactactacgcgcacctgcagcgctatgccgatggcctggccgagaaacaggcgatcaagcgcggggatgtgatcggctacgtcggcagcaccggcaatgccagcgccgaggccccgcacctgcacttcgaagtgcatgtgttggggccggagaagcagtggtggaagggagagtcgatcaatccctatcccttgctgaagtcggcggcaccgatgcccggcgctgctggcgccgcaacgccacagtgaagacagtcaacgcagcccccggaatcagcaggaacagcgccgccatcttccagaaaaagaacggccacagccagaggtagtccaggtcggtcagcttcagcagacccagcggcggctgcagctcgatgtctgcagtgcgtcccgccagcgccggatccacctccagcacggttacccgcagccatgagcggccgcgtggcaatgcgtcgccgcgaccgtaaccaaagtaggagaccatgaggccgctggactcaaccgataccagcgcgcggtcgatgccctgcccggccactcccgaacgctcccctgcgcggaagtctccatgttcggtgggagtctcgatgcgcagcagcacttcagggtcagcctctgtaccgtccgcggcataacgcaggtgcagccgcagttgatcatcgatgaggcggtagaccgtcacctcggccgtcgcacccgggctcagcagcagcggcagggtctgggtacgcgaggccaggcagttggcgatggcgccaagcgccagaaccaagccggccatgcaccacaggctccacgacacccacagggtgacccgcactaccgtcccgcctttcacgctgacatcctggtcatcgcgtcgcttccccgctggcctggccacacagtaacgaaaaagccccgcgtgcgcggggcttttcctgtcaccaacgccgggcatggcccggcgccacctcaggcgaacggatcctgcaggaccatggtgtggtcgcggtccgggccggtggagacgatgctgatcgggcagccggccagctcttccagcgaacgcaggtaggcgcgtgcggccggcggcaggtcgtcccactgggtgatgccgtgggtgttctcgctccagcccgggaactccaggtacaccggggtgcattcttcccagccctgcgcgtccagcggcgcgtactcggtgcgcttgccgttgtattcgtaggcgatgcagaccttcagcttttccatgccatcgagcacgtccagcttggtgatgcacaggccgctgatgccgttgatggccacggcgcgcttcagcgcgacgatgtccatccagccacaacgacgcggacggccggtcgacgcaccgtactcggcgccgcggtcacgaatgccctggccgacttcgtcgtccagctcggtcgggaacgggccaccgcctacgcgggtggcgtaggccttggcgatgcccagcacgtagtcgatcgaatcagcgccgacgccggaaccggccagcgcaccaccgacggtggtgttggagctggtgacgtacgggtaggtgccgtggtcgatgtccagcagcgcaccctgcgcaccttcgaacagcacgcgcttaccctgcttgcgcaggtcgtgcaggatgccggccacgtcggacttcatcggctgcacgtattcgccgaaggccagcgcttcgtcgaaggtcttctggaagtcgaccgcatcggtgttcaggtacttggtcagcacgaagttgtggtaatccagcgcggtgcgcagcagttcttccagctgcttcgggtaatgcaggtcggcgatgcggatgccgcgacgcgccaccttgtcttcgtaggccgggccgatgccacggccggtggtgccgatcgccttgccgccggctgcgcgctcgcgcgcctggtccagggcgatgtggtacggcatgatcagcggcgcggccggggagatcttcaggcgcgaacgcacttccacgccggaggcttccagctcggcgatttccttctgcagcgcggccggcgagatcaccacgccgttgccgatcaggcacagcgcgtcgtcacgcaggatgcccgatgggatcaggtgcaggacggtcttcttaccgttgatgaccagggtgtggccggcattgtggccgccctggaagcgcacgacggcgccgatttcctcagtgagcagatcgacgatcttgcccttgccttcatcgccccactgggcacccaacactacgacagactgacccatgacgggctcctcggtttgttgcggccatcggggccgcggacgggtaaaccgtggcggggctggccagcacctggagggcggctccaaacggggagcggccggcgatggagggcccagacacggaaaaagccgaacggggaggcccgtccggcttttgtgcattatccgggtttccggggtccgctgccacctttccgacggacggcttcaccggccggtcagccgccccgcccggtcgtgccggccgctggccggcaatgccaaccaaggttggcatctaccagagcctggccacgcaggtgcaggtcggtcagccgccccacccggtcgtgccggccgctggccggcaatgccaaccaaggttggcatctaccagggcctggccacgcaggtgcaggtcggtcagccgccccgcccggtcgtgccggccgctggccggcaatgccaaccaaggttggcatctaccagggcctggccacgcaagtgcaggccggtcagctgccccgcccggtcgtgccggccgctggccggcaatgccaaccaaggttggcagctaccagggccaagccacgctggtgccggtcagtcagccgccccgcccggtcgtgccggccgctggccggcaatgccaaccaaggttggcagctaccagagcctggccacgcaggtgcaggccggtcagccgccccgcccggtcgtgccggccgctggccggcaatgccaaccaaggttggcatctaccagagccaggccacgcaggtgcaggtcggtcagccgtcccacccggtcgtgccggccgctggccgacaatgccaaccaaggttggcagctaccaaggccaggccacgcacgtagtcgcaggcggccgcgccggggcgtctagtgccgcacccaccacaacaggctcaggccggccagcagcaccagtccgccgaagctgcgcagggccgggctgggcaggtccagcaggcgttcggccatgcgcttccaggcgaacggcgcgacgaacaggaacaggccttccagcaccgcgaccaggcagacggcggcgaacagatctttcatcggaactccggaaaaagcacggggcccggcagttggccgggccccgtggggtaatgccctgcgacctcagcggtcgttcttcaggtactgcaggaacgggtcgttcttgtcgagcacgatcacgccgttgccgtcggtcatggagccgcggtacgcctccaggctacggtagaacgcgtagaacgatgggtcagccgaaccggccttgccgtagatgcgggtggcttccgcatcaccttcaccgcgcaggcgctgtgcatcgcgctcggcctcggcgatcagcacggtgctgtcacggtcggcctgggcgcggatggtcagcgactgttcctcgccttccgcgcgcagcttggcggcttcctgcttgcgctgggcgcgcatgcgctcgtacacgtcgttgatcacctggctgtcggtgggcaggtccacctgcttgatgcgcaggtcgatcatctgcatgccaaggccggccacggcctcgttgattcccttcaactgctcggcgatcagctcactgcggtcgccggacaccagctgctgcagggtgcgcgagttgatctggttgcgcagcgaatcggtgatgatcggcgccaggcgggcgttggccacgcgcgggtcgccgccggtggcacggaagtagtcacccacgttggagatgtagccgatggcgaagaagtcgacgctgacgtccttctgctcggcggtgaagtagcgcgccggcgcggtgtcgagcacctggaagcggcggtcgaagaccttcaccgtttccaccaccggcaccttgaagtgcaggcctggcttgatgtccgaccgcaccaccttgcccaggttcagcaccatggcggtctggtcctcacggaccacatacaccgagccgagcaggcccagcaccaccgccacgatcacggcgatccagataggactcttcatcggctgccctcctcacggccgctcggtcgcccggtcgggcggcccaccggccggcccggatcacgggaagcttccaccgctgcgcccggcagcgacggcatgaccacgtccgggtttgccactgcggccggggccgacgtggtgggacgggtgtcgccggtcatcggcacgtagatcagctggcggccatcgccgccgatcaccttgcggttctcgctcagcacctgctgcacggtctccagccacaggcgcttgcgggtcacttccggcgcgtccttgtactgggcctgcaacaggctgaagcgctgcgcatcaccctcggccttggacaccaccgcctgcttgtagccttcggcggtggtacgggcgcgcgaggcctggcctcgggcttccggcacgaccttggcggcgtaggcctgggcttcgttgatcaggcgttccttgacctgctgggcaccattgacctcgtcgaaggccggcttcacttcctccggcggacgggcgtcctgcagggtcaggccggtcacggtcaggccggtcttgaacgccttcagcagcgcctgcaggcgctcctcggcggccacggccagcgggccacggttgttcagcacggcattgaggtcggcgcggccgacttcctcgcgcaccgcgctctgcgccgactgctccagcacctggttggcatcgaccgtgccgaacaggtactgctgcggatcgtcgatgcggtactggacgttcagcgagacgttgacgatgttctcgtcacgggtcaggaccggcacctggatcgagaaggtcttgatctcggtggcgttgaccttggtgaccgactcgatcggccacggcagcttgaagttcgggccgggctgcaggatgcgcgagaactggccgaagcgcaggaccacgccacgctgctgctcaccgatcagctggaagctggagaacagcaccagcagcaccacggccgccaccacccaacgcacgatgccgccgtcgaacaggtccttcagcggcccgggcagtccgccccagccaccaccattgccaccgccgcgcgacccgaacggcccgcgtcgattgtcctcggggccttgtccgcccttgttgccgccgggtgtattccaggccatgcacgctccatcaagatgtgggctgcggcgcgggcccttcccgcggcgccagccgtgaaaccattaccgatcatacaagatggggcggatcggcaggatcgaaagggcgacgacggggtaaggtggcgttttcctcgaagtcaggcaacgccgatggcccccaccaccccgttcaccgccttccgcatcgaaaacgacgacgccggctatcgcagcggcctgacccggctcggtgtcgacgacctcaaccccgggcaggtgctgatccgcgcccactggtcctcggtcaactacaaggatgccctggccggcaccggcaaggggaagatcctgcgccgcttcccgctggtcggcggcatcgacgtggccggcaccgtggtcgccagcaccgacccggcctggcgtgaaggcgacgcggtgctggccaccggctgcggcctcagcgagacccgtgacggcggctacagccagtatgtgcggctggagtcgcgtgcggtgattgcacagccggccgggctgagcccgcgcgaggcgatggtgctgggcaccgccggcttcacggcggcgctggcgctgctgcgcatgcaggacaaccgccagaccccggagctcggcccgctggcggtcaccggcgccagcggcggcgtcggtgcgctggcgctgtcgatcttcagccgtgccggctacaccgtgcacgcggtcagtggcaagccggaccagaccggcttcctgcgcgacatcggtgccagcgaggtgctgccgcgcgaggcgctggccgacaccggcccgctgcagtcggcgcgcttcggcgggggcctggacaatgccggcggcgccatgctcgccagcctgctggcgcagaccgtgccctacggcagcgtggtcagcgccggcctggcggccagcccgacgctggacatgacggtgatgcccttcatcctgcgcggtgtgtcgctgctcggcgtgtcttcggccaatgcgccgcgccggctgcgcgaagaggtgtggtcgcgcctgggcggtgagtggaagccgcagcacctggaccgcatctgcaccgccgaggtcggccttgatggcctccgggcagtgttcgagcggatgctggcgggtggatcgctgggccgcacggtggtgcggatcgactgaacgtcgcaggcaggcgacggacggcaggtgcccccctcccgccggtaatgagcccgcactacactgcggacattacatggggaacaacatggcacgcattctgatcgtcgacgactcaccgtcgcagctgttggggatacagcgcatcgtcgagaagctcgggcaccagatcctgaccgccaccgatggcgccgccggggtcgaaaccgccagggccgagctgcccgacctggtcctgatggacgtggtgatgcccaatctcaacggcttccaggccacccgtaccctcgcccgcgacgaggcgacccggcatatcccggtgatcctggtgaccaccaaggaccaggacaccgatcgcatgtggggcatgcgccagggcgccaaggcctacatcaccaagccgttctcggaagacgagctgtccgaggtgctggagcgggtgttcgccggccagggctgagacgcgcgtggtcgtgccggccgctggccggcaaccacgcgtcaccgtcccaggtcatgaaattgccggccagcggccggcacgaccgcaaggcgtgctcagatcgactcgccgaaggccttggccagattgcggtaggccttcttctgcgcctcgtcggtcgcggccggggccacgatctcgatttcaacgatctggtcgccgtccgggctgcccggcaggccgcggccacgcaggcgcagtttgcggccggcatcggagtcggcggggatcttcagctccaccgcaccgcccagggtcggcacgctgatgctggtacccaacgcggcctgccagggcgtgaccggcaacgtatagaggatgttgcggccgtcgacctcgaactgcggatgcgcggcgtactccacttccagcagcaggttgccgccatggttgccctgccctgccaggcggatcacctggcccggacggatgcccttgggcacgcgcacgtccagctgcttgccgttgacggtgatgcgcaggctgtcgccgctgtaggccgcttccagcgggaccgacagcttggcgcgggtgtcgcggttgggtgcgtggccctggctgctgaagcccgggcccggaccggcaccgccacgctggcgcgcgaacaggctttcgaagaagtcgctgaagccgccgttggggccaccaccgccgaatacttcctcgaaattgaaaccgccggcgccgccgtagttcggcggcacgttgaactcctcgcccgggcgatagccctgcgcgcgcagctggtcgtaggctgcgcgcttttccggatcgcgcagcgcctcgtaggcctcgttgaccgccttgagcttgtcttcggccccggcctccttgctgacgtccgggtggtacttgcgtgccaaccggcggtaggcggtcttgatctccgcctcgcccgcgctcggttccacccccagggtggcgtagtaatccttgaattccatccagctacctcgatctgcttcggccgcgccggtggcgccgccccgggttcattctacgcgccggcgatgctacgccgcccctcgtgcggccccggtgaggccgactgatcctgcgcaatgccgctgccatcccgatgccccaggctgtggctggaagcccccgccgcaacgcctgaagatggggcctgcacacgggttttccaatgtcttgacgcccctgtcccatccggcccactagcctgccccagcaaggagttccccatgaccatccatgtcggcgaccgcattccggaagtgaccctcaagcgcatccgcgagggcatcgaaacgcttgatacgcattcgctgttcgacgcccgcaaggtcgtgctgtttgcggtgcccggcgcgttcacccccacctgctcggcccgccacctgcccggctacgtcgaaaaattcgaggccttccgccagcgcggcatcgatgtctactgcgtggcggtcaacgacccgttcgtgatgaaagcctgggccgccgaccagaaggtgcccgacggcctgctgatgctgtccgacggcaatgccgagctgacccgcgcgctcggcctggagctggatgccagcgcctcgggcatgggcatgcgctcgcgccgcttcgcgctgtacgtggtcgatggcgtggtgcgtgcggcctggatcgagcagccgggccagttcgaggtgtcgtccgccgagtacgtgctggagcacctgcctacctgattccccaccgcagaaggaaacggccagcaatgtccagcaagccagccaaagccagcaagcccgccgccgggattcccggcatcagtgaccgtcagaccctgcgcgagcgtgcccggcacaacatcgaagacggcgcgatcaccgacagctacagcgccgaccgcaaggtggtgatcaagctgctcaacgatgccctcgccaccgagtacgtgtgcgtgctgcgctactaccggcactatttcatggccaagggcatgctggccgacgcggtcaaggccgagttcctcgagcatgcacagcaggaacaggcgcacgccggcaagctggccgagcgcatcgtccagcttggcggcgagccggacctgaacccggatacgctgaccacgcgctcgcatgccgaatacaaggaaggcagcgacctgcgcgacatggtgcgcgagaacctggtggctgaacggatcgccatcgacagctaccgcgagatgatcaacttcatcggcgaccgcgataccaccaccaagcgcatccttgaagagatcctggcgcaggaggaagaacacgccgacgagttcgccgacctgctggacgggtggatcggggaatagcggccccgcaaacgccttggtagatgcccaccttggtgggcgcatttatcgcgtgccaaccaaggttggcacctaccagagcacggatgcgtcgggtcgacgggccattcccagcacctatcgcaggacgttgaaccgcacctgcgtccacgcgccgtcggctgccagcgcggtcagggtgtgtgcgcccggatcggcgaactcgcgctgcatcagctgcgcgccgtgggtctgtgcaatccagcgtccatccagcagccagtccaccgcctgctcgctgcccagcgcgcgcagctgcaggcgcacgccgtgctcggaattcggcgcgcgcgccagcgtggcgccgtcattgagcccgtccacgtgcagcgcgacgctggcctcacgcccgtcgtcgcggcagtccggcgacagcgccggcagctgcgaagcctcgcgcgtggccttcggcagccacggcgacaacaacgccggccaacgcgcgatctcccgcgcgacttcctgatgcggcaaacggcaatcagcggatacacgcagaccggtccgcgcgtcggccaggtaacgctgccgccccggctgccagcgccgcgcctcgcgctcggggaaggtcggcggtgccgcaccgtccagcagataggccgacatccgccgctggcacagcgccgctggcaggccctcggcacgttcgccggtgggccagcagacgtcctcctggctgacactggccggcatcggtgcagcagctgaatcaccgcgctggcgcggcaggctgtccaccacctcgaacatcagcggcagcgcggtcaccgcgccgtactggcccggcaacggggtaccgtccggccgacccacccacacgcccacggtgtagtggcgggtgctgccgatcgcccacgcatcgcggtacccgtaactggtgccggtcttccacgccacgcgcgggcggccaccgacatcgaacgtcccgacgctataccccggccgcggattcgattccagcatctcgcgcacgatccagctggcgcccggcgaggccaggcgacgctcgatcatcggttcgtcatcggtgtagcgcacgcgcccggcgatgccgttgcggttgagcgctgcgaacgcaccgaccagatcttccagccgcgcaccggtgccgcccaggatcagcgacagattgggtgtactgcccggcgggaagcgcagctggatgccggagtgcgacaggcgtgcggcgaagcgcgccggaccgacccgctgcagcaggtccaccgagggcacgttgagtgacagccgcagcgcgctggaggcaccaatcggcccattgaaagccatgtcgaagttgccggggcggtagctgccgaaactctgcggcgcatcgaccagcaggctttccgaatggatcaggccatcgtccagcgccatggcatacaggaacggtttgagcgtggagcccggcgaccgccaggcctgcaccatgtccacgtggcccagccgctgccggtcaccgaacgccagcgtgccgacataggcacgcgcctgcagggtctggttgtcgaccaccagcagggcggccgaggtgcgttccggcagcgtcgagaaatagctggccacgcgttcttccagcgttcgctgcaggccgatgtcgatgctgctctggatgcgtgcctggcccggatgcgccgagtgcaggcgctgcgccagcagcgcggcgtgcagcggcgggcgcagcgagcgcgccaccacgttctcgatgcgcgcgtcttccacttcgtccgccgtccacacgcccagctcgttcatgcgggacagcaccttgtcgcgcgccttctgcgccgcttccggatgacggtccgggcgcagccggctcggcgcctgcggcagcaccgccagcaacgcggcctcggcatgcgacagctgcgccgccggcttgcccaggtaggcccagctggccgcttccaccccctcgatggtgccgccgtagggcgcgcgctccagatacagggccaggatctgctgcttgctcaggtgcacttccagctgcaccgcgcgcagcatctgcttgagcttgccccacggcgtgcgcgtatgcggatcgaggatgcgggcgacctgcatggtcagggtcgagccaccggaaacgatgcggccgccacgcagcagctggccgctggcacgcaggatcgccagcgggttgatgcccggatgccgccagaaccagcggtcttcgtaggtcagcaacgcctgcaggtacagcggcgaaacgctgtcgatcgaagccggatagcgccacacgccctcggcatcggcgaacgcacgcagtggcgtgccgtcggcagccaccaccagggtgctggtatcacgctgcttcggcagcggtggcgggaaggcgaaatccagcaccagcagcagcgccagcgtggcggccgtgccccagcgcagccatggccacagcggccgcaaccggcggcgcagcgccgccagccgggtcgtcatcgtgttgttcattgcaggttgccagcaggacgggccgcgccgtcgcggcccgtccgcgcggtcacggctgtaccaccgtgatcgtggtcgggttgctgcggcccaccccacgcagctgcggccggtacatgtcctccaccagcggcggcggcaccgagtaggttcccggcgtcaccgcgcgtaccaggtagaacacgttggccttgctgccacgcgagagcttcagcgcggccacatagcggtcatcgcggaactcctcgtgcttggtgtcggcggcctcaccacggtcgctgatggtgatgccatcgaccaccacgtcggcccactgcttggcgtcgcccaggttgaagttctcgatttccaggcccgccggcagcaggtcggtcagcagcgcatcgggcatcgtggtgtcggcagtcaccgtgacgcgcacgatcagcgcttcgccttccttcagcgggcgcggcgaccacggcttgccatcggtgccgtagtagctgcgctcgacgcccagcacgctgttgtccggtgccggtgcgctgcgcgggatgccggccacgtcgatgctggcgaacatcggcggctgcccctgcggggtgaagcgcacgccgctggccagctcactggcgctgaagttgcggccgagcagcttgcgctcgccgatggcttcggtgttgccaccgatcaccagctcaccggccaccagcgccttctggttggcggccagcgccttgccgagacgtgcaatcgccacctgttcctgcgtgctcagccacatccagccggcgttgcggcgcgcatccaggccacggccgagatcgaccgcacgcgcatcccaggccggcttgaccagcttgttctcgtgggtcagcgcgatcatcagcgcgtcatcacggatcgcactgccgtagtcgccgaagtacgacgggcgctcgctgctggacttggcgaaggccgccgccagcgcggcctggccacgcttggcatcaccctgcaacgacagcgccacgcccaggtggaccagcgacaggccgccgaccgccttgctgcgctcgttgtcgtacagcgtgcgcagggtacccagcggcgcacggttgacccgggccagcacgtaacccgaatacgcctggttggcgaacttcagcttctcgcgatcctcctggccatagaactgattgccgccggacagcagatcctcgctgagccggttgagcgccttctgcagcacgttgtcgggcacggcgaagccggcgtccttggcatcaagcaggaattcggtgatgtacggggtcagccacggattgacgtagccgtcgtcaccccacatcgagaagttgccattggccacctgcatcgacgccaggcgaccgaacgcaccttccatgcgctctctacgggtcttggcatccaggccgtcggcaccgagcatcgacgacgtcgcctggtccaggatcagcgcggcatagcccttgctggtggtctgctcggcacagccatacgggtagttcagcgcgccctgcagtgcactggcgaacgggatcggcggcagcgggctgaccagcaggcgggcattcaccgactctgccatcaggccatcggtcaggctgttgtcgaggctgaccgcggccagcggatcgagtgtgcgcacctgcgaacgcagcacctgcggccacgccgcacgcaccggcaggtcgtagcggcgatcagccttgaagccgttgccgtccacccgcacccgcaccttggccacgctgtggccctcgcgagccgacaacgggaagctcagcgtggtcttggcatcggcattcaactgcacgctgcggctgccctcacccaggttcagcgggccctcgctttccaccttcacgttgaactgccccggcttgccggtgaagttctgcacgtccagggtcacggtgctgcggtcgcccggggccagcacgcgcggcatgctggcttcggccaggatcggggcgcgcacgatggtttccacgtcacgcttgccgtactggtcatcgctgtagaccagcgccgacacgcgcagggtgccgttgaagtccggcaccttcaggcggatgcgggcattgcccttggcatcgagctgcaccgggccggagaacaggtccacggtctgcacgcgcgcggtcgggcgcttggcctgcggcagtgcctgcagcgccatgtcgccgccgaacttcagcttgccgctgccaccatcgaagctctcgatcacccggctgtagatgtcataggcatcgataccgaggcgacgctgggcgaagaagtgcgcgccggcgtcgggcaccgggaaacgggtgatgttgaggatgcccacgtccaccgccgagacggtcacgtgcgcggccctgccggccagctgcggtgcgctgaccgttaccggcaggtcctgttccggccgcatctgcttgggcgcgaccaggccgacggccacggttcggcccttgcggtccatcggcacatgcaccacgcccacggcgcgggccggggtgatcttgctcggcgcactgccgccgcggaacaccagcgcggtgatgtagacgtcgtggcgttcccagtcggcggtgaccgggatcttgaaggtcgagcccggcttggcctcgatgtcctgcacatacagcatgcggtcggtctcgaccatcaggatgcccttgccggcgtgcggcggggtcaccgtcacttccagggtgtcaccggccttgtagccggtcttgtccaggcccagcttgaccttgtccgggcgtgcatccaggccacggttgtcatcgccccagctccagcccgcacggaacgggtagcggctggtcagtccggtggacggatcgaacacgtccacccggtactcgccccactccaccgggaaatcgaaggcaaccgcactgctgccggcatcgacggtgcgggtttccttgttctcgaaacggcgggtgaaatcgtaatcccagcggttgtcgttgaaggtccagtggtagtcgcgcagttcccgcaccagggtgatcttcaggcccttggctggctgcggtgtgccggcggcatccacgcgcatcagttcgaagcgtgcgttgccgttggaatcagcaccatcgtcggggttgaacagcggccgcacgccgaccagcgcgttggccggccacatcacccgtttcagggtacgggtgaccgtgcggccaccggtttcatacaggctgccggacaacaccacggcgatcggtgccttggccttggccgcctcttccggcaacgccacatcctcacgcagctggccattggccggcagcgtggtatcgatcacgtccttggcctcgcgcggcagctgcagggtcgggtcaccgaagaaatagcccggcaggccctccaccggcttctgctcggcagccaccgccatgcgcgcagtgaagcggttgccatcggccggcgcgccgtacagataggcgccgttggcctgcaggcgcaggtcctcgcccggcttcagcgtcttctgcgcgctgtccaggtccagcttcatgcgctcgggcaggaactcctcgatgcgcagggtcatgccctggatcgcttccttgctggccgggtcggtgcggaactcgacctgccagcgcccggtcggcgcctcggcggggatcacctgctcgaagttgatgtagccctggtcgcccggctgcaggcgggtctcgcggaaggtcttgccgtcgggctgcttcaggcgcaggaacaccggttgtgccttgaccggtttgccgtcgttgtcgcgcagcagcgcggacaggcgcacggtctcgcccgggcggtacaggtcgcggccggaccaggcgtagacgtcgaaccaggcgttgtcacgaccggccacggcgaactcactcaggtccagcgccggctggttgaacggcaggaagctggtgtccttgccactgctggcgaccagcacgtgggtggcatccagggtgtagttcagcagcgcattgccgttgccgtcggtgctgcccttcagcaccacctcacccttggcgtcgagcacgcgcaggtcgatgcccttcagcggcgcaccgtccttgaggccggcggtgtgcacgaacagcttgtccttgtaggcacgggtatgcaggccgatgtcgctgaccgagaagaacgcggtatcgaactcgccctcgtagtcaccggtgcgcttgagcagggcgaagtacaggcccggctcctgcagttccttgatgtcctgggtcggcaggtaggtcagcacccgctcgttctgtttgccacccaggatgaagcggttgacgtagaccggctcggccagcttgttgatcgggctgcgctcgtagtcgctgctgagctcccagctgccacggcggccgccgcgctggtactggctgaagaaggtcggcaggtccttctcgcgcacgcgcaggaactcgacatcgacctccggcacgttcaccgagaccaccggcaggccgcggctgtccttggccggcagcacgctgccctgcgaggcgaaaccgaccaccggcttcagctcgccgctgaacaccttctgcttcagttccttgcccagccggctgccgtcggcggccagcaggtccggcgagaccaccaggctgaactccttgccggcctcgacgaacgggtaacgcagggtcaggccgtcatcggacagggtccagctgctgtcctcggtgccgaccttctcttcgaagcgaacgagtttgtcgaaatcctgggtgccgaccagcgggcgcgagaactccagcgccagcgacaggccgtcattcttctggtccgggtaggcacgcagcagggtgaattccttcacctgctcggccttggtggtgatggcttcaccactggccttgggcagctgcccgctgtcattgcggcagccggccagccccagcaacaggcctcctgccagtacggccgccgcccatccccaccgcttccgccgtgccggaccgctcatgtcgtcactccttgatcgaggcggccattataggcaggccacgtcaaggtgttgacgcaaatccggcaattgccgcggtgcgggtagtgccggccgctggccggcagtctcggtagccgccaaccttggttggcgtcggccgtgccaaccagggttggcacctacccaagcgggtcgagccacgtgcccggcaagcaggcgcggtgtcagatccggtgaagcgtcccctaccccggcaggtacaggtccacatagtcggtcaccggcatcgccgccagcgccaccggatccagcgatgcggccaggatgcgctgctgctgggtggtcgggaagcgatgggccaggtgccggcggaacttgtccatcagcaacgggatgccctcctcgcgtcggcgcgcgtggcccagcgggtattccaccagtacctcgggcagctcggtgccgtcgctgaagcgcacgctcaggccgttggcgatgctgcgcttgtccgggtccaggtagtcggcgctgagctgcggatcctcatgacaggccatcttcgcgcgcagtgcgtcgatgcgcgggtcggcggcaacgtcgtcctcgtagtcctgggccaccagccgcccatgcagcagcgcgatggcgaccatgtactgcacgcagtggtcgcggtcggccgggttgtgcagcggcccctgcttgtcgatgatgcggatgcaggcttcctgggtgcggatggcgatgtgcgcgatgtcctcgacccgacgccccatcgcacgcagctgctggtgcagcgtgatcgccgcctccaccgcggtctggccatggaactcggccgggtagctgatcttgaacagcacgttttccatcacgtagctgcccagcggtcgctccagcgtcagcgccttgccctgcatcgataccgcttcaaaaccccaggtcggcgcgctcaacacactgggatagcccatctcgccactggccgccatcagcgccaggcgcacgccacggctggtcgcatcgccggccgcccagctcttgcgcgagccggtgttgggtgcgtgccggtaggtgcgcagcgcctggccatcgacccaggccagcgacagtgcattgagcatgcgttcgcgatccaggccgagcagctgcgcaaccacggcggtggtggccaccttgaccagcaccacgtggtccagcccgacccggttgaaggaattctgcagggccagcacgccctggatctcgtgtgccttgatcatcgccagcagcacgtcatgcagggtcggcgctgggcgatgcagggcctgcgcgttgcgccccagccaatcgcagacagacaggatgccgcccagattgtccgacgggtggccccattcggcggccagccaggtgtcgttgaaatccagccagcgcaccatcgcgcccaggttgaaggcggcctgcaccgggtccagcacgtagtgcgtacccggcacgcgcgccccgttgaccacgctgatacccggcaccagcggaccgagcagcttgctgcaggccgggaaggacagcgcttccagcccgcagcccagcgtgtcgagcaggcagtagtgcgcggtctggaaggccaggggggagtcgatgcgcgcgtcgcgtacgtaatcgacgatgtccaccagcagcgcatcccacgctgcacgctcgttggatggggtgtggctgtcagacatcgtcgatctcctcttcagagctcaggccgcgcctcccggtagtcgccaaccttggttggcgctggacgttgcccgggcggtgccaatgccatgccaaccaaggttggcatctaccgaagcatgtgatgccagcgccgaccggctggttattcggccggcacccgcaccttgccttccatcaatacgcgggcgctgcggctcatgatggccttggtcactgtccactggccgtcaacgaggccggcctgcgcgcccacgcgcagcgtgccggaagggtggccgaaggtcaccgcttcgcgttcaccaccaccggccgcgcgattgaccagcgtgcccggaatcgccgccgcagtgccgatcgccacggcggcggtgcccatcatcgcgtggtgcagcttgcccatcgacaacgcccgcgcgtgcaggtcgatggccgaggccggaatggccttgccgctggaggacacgtagtcctgtgccggcgccacgaaggccaccttcggcgtgtgctggcgggtggccgcatcttccaggttcctgatcagacccatgcgcaaggcgccgtaggcgcggatcttctcgaagcgctccagcgcccccttgtcctcgttgagcgcagcctgcagttcggtgccggtgtagcccaggtcggccgcattgaggaagatggtcggaatgccggcggtgatcatggtcacctcaaaactgccgacgcctggcacgtccaaggtgtcgaccaggttgccggtcgggaacatcgcgcccgcatcgccgtcatcggacggatcgatgaactccagctggatctcggcggccgggaaggtcacgccatccagctcgaaatcgccgatctcctgcacttcgccatcgcgcatcggcacgtgggcgatgatggtcttgccgatgttggcctgccagatgcgcacggtgcacaggccatcgcgcggcacccgggccggatcgatcagcccattggcgatcgcgaacggacccactgccgtactgaggttgccgcagttgccgctccaatcgacgaaggcggtgtcgatcgagacctggccgtacaggtagtccacatcgtggtccggcaccgaggcggtggagatgatcacgcacttgctggtgctggaggtggcaccgcccatgccgtcggtctgcttgccatacggatcgggcgagccgatcacgcgcatcagcagcgcatcgcgcgcggcgcccggcacctgagcggcttcgggcaggtcctgcaggcggaagaacacgcccttgctggtgccgccgcgcatgtaggtggcgggaatacggagttgcgggaggaaggtcatcgtcgaatccacgcgtttgaatttcaggaaatgtcttgcatcagtgcgtcaagaccacgatcaacgcaccacacacgcatgatgtccacgcggtccggtagatcgaggtaatagacgaggtagcgttcgaagcccggaaccagcatgaaccgcaacggcaccggcagctgtgctgcgaggtcggcgtgccgggtggaacccgagcctggaaacacggcgatgcgttgaagcgtggcctccaactcggcgagaaagcgccgacccagtaccagcccaccctgccgtgcaaaccacagcgcggcatcggctgcgtcggcttcggcccttgaccgccattcaatcgccttcacgctccaacctttcggtcagttcgcgacgcatgcgctcgaatgtgtcggccgtcaccgcaacgcctggaccagaagccagcccctcggctatcaactgcttgagcagctcttcggccttgctgcgctggcgctggcggatcaggtcacgcacgtagtccgacgtactggagtagccgccttcacgcacttcctcgtccacgaactgcttgagcgggtcggtcagcgaaatgttcatggtggccatgaaactctcctttggcagtttttgccaagttagtctgcgccccgccctggtgtcggacaagcccgcccccggcctccgggggcaggcattcaggccggtatcacgccaccctggcgccttccaggaaatcctgggcgaagcgctgcagcacgccaccggcttcgtagatcgccacttcctcgtcgctgtccaggcggcaggtcactggcacgatcacgtcctgcccgtcgcggcggtggatgaccaaggtcaggtcggcgcgcggggtgcgctcgccgatcacgtcgaaggtctcggtaccgtcgatgcccagggtcaggcgggtggtgcccggcttgaactccagcggcagcacgcccatgccgatcaggttggtgcggtggatgcgttcgaagccttcggccacgatcgcttccacaccggccaggcgcacgcccttggcggcccagtcacgcgagctgccctggccatagtcggcaccggcgatgatgatcagcggctgcttgcggtccatgtaggtctcgatcgcttcccacatgcgcatcaccttgccttccggctccacgcgcgccagcgaaccctgcttcacgctgccatcgtcgttgcgcaccatttcattgaacagcttcgggttggcgaaggtggcgcgctgtgcggtcaggtggtcaccgcggtgggtggcgtaggaattgaagtcctcttccggcaggcccatcttcgccaggtattcgccggcggcactggacgccaggatcgcgttggacggcgacaggtggtcggtggtgatgttgtccggcagcaccgccagcgcacgcatgcccgacagtgtgcgctcaccggccagtgcgccctcccagtacggcggacggcggatgtaggtgctctgcgggcgccagtcgtacagcgggctgaccgccgcgccatgctccacgcgcacgttgaacatcgggttgtagacgcggcggaactgctcgggcttcaccgaggccttcaccaccgcgtcgatctcggcatcgctcggccagatgtccttcaggcgcacctcgttgccctcggcatccacgcccagcacgtccttctcgatgtcgaagcgcacggtgccggcgatggcataggcgatcaccagcggcggcgacgccaggaaggcctgcttcgcatacgggtggatgcggccatcgaagttgcggttgcccgacagcacggccgtggcgtacaggtcgcgatcgatgatctcctgctggatggccggatccagcgcgccactcatgccgttgcaggtggtgcaggcgaaggcgacgatgccgaagccgagcttttccaggtccggcagcaggccggattcttccaggtacagctgcaccgccttcgagcccggcgccagcgacgacttcacccacggcttgcgcagcaggccacgttcgttggccttgcgcgccagcagtgcggcagcgatcacgttgcgcgggttggaggtgttggtgcagctggtgatggcggcgatgatcaccgcgccgtcgggcatcaggccctgcgcctgctcggccctgcccgctgccagcttggcttcgtcggcgatgccgcgctcggccagctcggcggtggccacgcgcttgtgcgggttggacgggccagccatgttgcgcaccacgctggacaggtcgaagcgcagcacgcgctcgtactgcgcggtggccaggtcatcggcccacaggccggtggtgcgcgcatagttctccaccagcgccacctgcgattcctcgcggccggtcaggcgcaggtaatcgatggtctgcccgtcgatatagaacatcgcggcggtggcgccgtattcggggcacatgttggagatggtggcgcggtcaccgatggtcagtgccgacgccccctcgccgaagaattcaagatacgcacccaccacgcgttccttgcgcaggaactcggtcagtgccagcaccacgtcggtggcggtgatgcccggctgtggcctgccggtcagctcgacgccgatgatatccggcaggcgcatccacgacgcgcggcccagcatcacgttctccgcttccaggccgccaacaccaatcgcgatcacgcccagcgcgtcgacgtgcggggtgtggctatcggtgcccacgcaggtatccgggaaggctacgccgtcctgcacgtagatcaccggcgacatcttctccaggttgatctggtgcatgatgccgttgcccggcggaatcacgtccacgttctggaacgcctgcttggtccagtcgatgaagtggaaacggtcttcgttgcggcgatcctcgatggcgcggttcttctcgaacgcctgcggatcgtagccaccgcattccaccgccagcgagtgatcgacgatcaactgcaccggcaccaccggattgaccttggccgggtcgccgcccttgtcggcgatcgcatcacgcaggccggccaggtccaccagcgcggtctggccgaggatgtcgtggcacaccacgcgtgccgggaaccacgggaagtcgaggtcgcgacggcgctcgatcagctgcttcagcgaatcgccgagcgtggtcggatcgcagcggcgcaccaggttctcggccagcacgcgcgaggtgtacggcagggtggcataggcgccgggctggatcgcatcgacagcggcgcgcgcgtcgaaatagtccagcgcgctgccggggaggttcttgcggtaatcggtattcatgggctggcggagtgcttggggcgggccggatgccggcggtgcggcggcgaaagcacccggccggcatgcggccggccggatgggtacagcagggggatcagacgcgcttgtcgatggcaacgaagtcgcggtcttccggaccgatgtaattggcgctcgggcggatgatcttgccgtcgatgcgctgctcgatgatgtgcgcgctccagccggcggtgcgcgcgatcacgaaaagcggggtgaacatcgcggtcggcacgcccatcatgtggtagctgaccgcactgaaccagtccaggttcgggaacatcttcttgatgtcccacatcaccgactccaggcgctcggcgatgtcgtacatcttcatgctcgactgttcctcggacagctcgcgggccacgtccttgatcaccttgttgcgcggatcggagacggtatagaccgggtggccgaaaccgatcaccacttccttgcgctcgacgcgcgccttgatgtcctcctcggcctcatccgggttgtcgtagcgcttctgcacttcgaacgccacttcgttggcgccgccatgcttcgggccacgcagcgcaccgatgccaccgcagatcgcgctgtacatgtcgctgccggtaccggcgatgacacggcaggtgaaggtcgaggcgttgaactcgtgctcggcgtacaggatcagcgaggtgtgcatcgccttcacccacgaatcctgcggcttttcgccatgcagcaggtgcaggaagtggccgccgatcgaatcatcgtcggtttccacatcgatggcgcggccgttgtggctccagtggtaccagtacagcagcatcgaaccgaggcaggccatcagcttgtcggcgatgtcgcgcgcgcccgggtggttgtggtcgtccttctccggtgccacgcagccgagcacggacacgccggtgcgcatcacgtccatcgggtgcgccgacggcggcagctcttccagcgcggccttcaccgcggcggggatcccacgcagcgacttcagcttggccttgtacgaaaccagctcggcgcgggtcggcagcttgccgtgcaccagcaggtaggcgatttcctcgaactcgctggtgttggccaggtccaggatgtcatagccgcggtagtgcaggtcgttgccgctgcggcccacgctgcacagcgcggtgttgccggccgcggtgccggacagggcgacggacttcttcggcttgaaggtcggggttgcggtcgtatcgttcatgtttccctccgaaacttgatggtgcagggtactgcttatttcttggcggcgaacagcgcatcgagctgctgctcgaaggcgtgatagccgatgcggtcgtagagttcctcgcgggtctgcatggtttccaccacgttgcgctggtggccatcgcggcgcaccgcctggtagacgttctcggcggccttgttggcggcacggaacgccgacagcgggaacagctggatggcgacgccggccgaggccagttcatcgcggctgaacagcggggtggcgccgaattcggtgatgttggccagcaccggcaccttcaccgcgtcgacgaagcggcggtaggtatccagatcgtaggcggcctcggcgaagatgccgtcggcaccggcctcgacacaggcgatggcgcgctcgatcgccttgtccacgccgtccacctggatggcatcggtgcgcgcgatcaggaagaagtccggatcggtcttggcatcggcagcggccttcacacggtcgaccatttcaccctgcgagacgatctccttgcccggacgatggccgcaacgcttggcaccgacctgatcctcgatgtggcaggcggccgcgccggccttgatcagcgacttcacggtgcgcgcgatattgaacgcgctcgggccgaagccggtgtcgatgtcgaccatcaagggcaggtcgcagacatcggtgatgcggcgcacgtccaccagcacgtcttccagggtgttgatgcccaggtccggcaggcccagcgagcctgcggcaacgccgccgccagacaggtaaatggcacggaagccggcgcgcttggccagcagggcgtggttggcgttgatcgcaccgatcacctgcagcggcgattcggcagccagcgcctcacggaagcgggcaccggcggagaaaggggcagaagcggtcatgcgacgatccaggttgaagtacggataaggaagcgcaagcaccatgccaagctgcaagcggttgatttcacgggaatgaccggcatgcagcagtggaacatatgaaacattgaaacggatgtatcatgaaacatcctccccgaaccggctgccatgtatctgccccgctccccgcttcgccatgccgatgccgacccgggccgtccggtgatctggacggtcagcgtctcgcggctgaccggcctgctcggcgacgtgatccccgagttcgaccgccgcgcgcgtatcgaacagatcaacctcggcttcgaggaagcggtggaggtgatcggccaacgcctgcgccgcgagcactgcgacgtggtcatcgctggcggctccaacgcggcctggctgcgcggccggctggagctgccgctggtgccgatccaggccaacggcttcgacctgatggaagcgctggcccgggcacggcgtatcgccagccgcatcggcctggtcacccacgccagcgacgtaccggtgttcagcaacttccagcagagtttcggcctggatatcgagcatcgccgtttcgtcacccgcgaggatgcgcgcgactgcatcgccgacctgcgcgccaacggcatcgaggtgatcgtcggcaccggcatggccatcgaccatgccgagcaggccggcctgcccggggtgctgctgtattcggccgactcggtgcggcaggcgttcgaacatgcgctggaactgacccagaccctggcacgttccggcagcaaccgcgctgcaccgcgccggcgcccggcagcgcgtgccgatgcgcatgaactgctcggcgacagcgacgcgatggcgcaggtgcgcgcgcagatcgcgctgtacgccccacatgacagcaccgtgctggtcagcggcgaaaccggcaccggcaaggaactggtggcgcgccagctgcacgccgccagcgggcgccgtggccgcttcgtcgcgctgaactgtggcgcgatcagcgaatcgctgctggaagcggagctgttcggctacagcgatggcgccttcaccggcgcacggcgtggcggccgcgttggcctggtggaagctgcagatggcggcaccctgttcctggacgaaatcggcgaactgccgctgccgctgcagacccgcctgctgcgggtgctggaggaacgtgaagtgctgcgcgtgggtgccaccgaaccgacgccggtggacctgcgcgtggtcgccgccaccctgcaatcgctggagcagcgcgcggcggccggcagcttccgccgcgacctgtattaccgcctggccgcgctgcggattgccctgccctcgctgcgcgcccgacgcggtgacatcccgttgctggcgcagcatttcttccgccagctgcgtggcatcgacgcgccattggatgaggcggcgctggcggtgctgcgcgcggccgagtggccgggaaacgtgcgcgagctgcgcaatctggtcgatcgcctgcgcatccactggcagcccggtgaagggctgatcgatacggcgcggctgctgcagctggcacccgagctggtgcatgaaggtgtcgcggcgttgccgctggaaagcaacggcaggcgcccaccgcgggccaagctggaagcactgttgcgggaacaccggcatgatcgcgagggcatggcgcaggcgctgggcgtgtcacgcaccacgctgtggcgctggctgcgcgcggaggacctgtaaagccgagcccatgcccggctgatgttcccgcgtaagcagccgagcatgggctcggctctacagggtgcctgtcgtcagcgcgcttcgatggcgaaccgtccactacccactgcggcaatccacaacagcagcacgcccagcggcacttcgctcaggtagaagaaccagctcagccaatccggcacgctcagtcccgcaggaatgcgcgcgatgccatcggtcagcgcagccactacgcagatcgccgccagcagcagggccgaggggcggctcaaaaggcccagcaccagcagaccacccgcaatccactcgatcgcaccgagtaccggcgcactgaacaccgggaatgggataccggcgtcgaccagcgtatgcaccatgcgctcgcgcccggcgtcggtgaacaccttgttccagccggacacgcagaacatcacacccgccacgatgcgggcgagcagcaacaacaacgcttccacgccgcggcgtggtggcggcacggcaaacaggcaacgccaggagggcatggcaactccgcagatcgagggcatcgcagcgagtgtgcccgtcgccgacctgctcgtgcatgaagcggaccagtccgttcgcgacaaacgcaggttgctgtagagccgagcccatgctcggctgctcctgcgagaacatcagccgagcatgggctcggctctacagcagccccagcaccaccccgccttacgggtacagcaggcgcttgctccagcgcccttcggcgccggcttcatagcaccagcgctcgtgcaggcggaactgcgcgccataccagaactcgatgcggtcaggcaccacgcgcaggccgctccagccctccgggcgcggcacgtccttgccctcgaagcgggcttcgacctcggccacgcgcgcatcgaattcctcgcgcgttgccagcgtcttcgactgctgcgaggcccaagcaccgatctggctcatgcgtggacggctggcgaaataggcgtcggcctcgtcagcggcaacctgctcgacgcgaccctcgatgcgcacctggatgccgccctcgcgcaggctgcgccacaggaacagcagtgcagcctgcggattggcctgcagctcccggcccttgtggctgtccagatgggtgtagaacacgaagccacgctcatcgaacgccttcagcagcacggtgcgcgccgagggacgaccctgcgtatcggcggtggccacggtcatcgcgttcggctcgacctcgcggctctgtttggcctcgtcgaacaggccggcaaacgtggacagggcttcggcgtacaggtcgctcatgattgcgttcttctcacacggattgggctattgtggctgcatggccgctgctgcgtatatgccccaggtgaaaggattccccgaaacattggccgaacaggcgctggatgatgcgctgggcagcggcgcagcggttccagtattggcgatcagcggcctgcaggggagcggcaaatcgacgctggcggcgcaggtggtggcccgtgcccaggcacgcggcctgaacgcagccacgctgtcgatcgatgatgtctacctgacccgcgcacagcgccaacggctggcccgccaggtgcacccactgctgatcacccgcggcccgcccggcacccacgacctgccgctggcccatgcggtattgaacgccgtggccgcacgccagcccttcgcaatgccgcgcttcgacaagctggccgacgagcgcctgcccgaagcacactggccgcagctgcggcaaccgctggacctgctggtattcgaaggctggttcctgggcacgcccgcgcaggatgacgacgcgctggacagcccgttgaacgcactggaacgcgaagccgacgccgatggccgctggcggcgctggtgcaaccagacgctggcccgtgactacccggcgttgtggcagcgctgcgaccgcctgtggttcctgcagccgccggatttctcggtggtaccacgctggcgctggcagcaggagcagaacctgcaggccgcgcagccgggccggcacggcatgagccggccacagctggagcgcttcgtgcagtactacgagcgggtcagccggcaggcattgagcgccctgcccgccctggccgaccacgtggtagtgctggacggccagcgacaggtgcaggacgtgcgctgaacgcgcccctattccaccaggaaagtcacccgcaggttgacccgccattcggtgatctcgccgctgccattggtgaccaccttggtctcgttcacccaggcgccctggatgcccttgaccgtctcggagaccttcttcagcccgctgcgcacggcgtcttccacgcttttcggcgaggacgcagtgatttcgatgaccttggcgaccgtcatggcctgtactccgtctggcgcgggagaccccgcaggaacgcccaccctgacgtgaagaacgtaaaggccagggcacggaggtgttagcatcagaaggcatgaatcctgctccgaacctgatcctgatcggcccgatgggcgccggcaaaacctgcatcggccgccgcctggccgagcgtttcacgctggacttcgtcgatgtcgaccaggccatcgtcgatgccgccggcgccagcattccgaccatcttcgagcactccggcgaagccggcttccgcagccatgaacgccaggcgcttgcgcgggtactggaaggccgtggccagctggtctccaccggtggcggcgccgtgctggatccggacaatcgtgcactgatcgcccggcgcggcttcgtggtctatctgcgggtcagcgtggccgaacagctcgagcgcctggcccgcgacaagggccggccgctgctgcagcgcccggaccgcgagcaggtgctgcacgatctggccgcacaccgcgacccgctgtaccgcgaactggccgacctcaccctcgacaccgacccgtataccgctgccgatgcgaccgcccaactggtggtcaagctggccacgcaatggcagcgccaggacctgaccgcatgacctcccccgccctgctgcaggtcgccgttggcggcgaccgcccctactccatcaccatcggcgccggtgcccaggccgatggcaccgcgctggcctcgcacgtgcgcggccgtcatgtgctgctgctcagcgacagtgaagtcgccccgcgctatctggcgccggtgaagcagacgctgctggccgctcgccccgacctggtcatcggcgagcacgtgctggccgcgggcgaagcctccaagacgctggccgagttcggccgcgcgatcgaagcgctggccgcgctcggcgccacccgcgacgcctgcgtcttcgccctcggcggcggcgtggtaggtgatctcgccggtttcgctgccgcctgctggatgcgcggcgtggactgcgtgcagctgccgaccaccctgctggcaatggtcgattcgtcggtgggcggcaagaccgcagtcgacattccggccggcaagaacctggtcggtgccttccatccgccgcgtgcggtcatcgccgatacccgcgtgctggccaccctgccgccacgcgagctgcgtgccggcctggccgaagtggtgaagtacggcgcgctgggtgatgccgtgttcttcgagtggctgcagcagcatgccgatgcgctgctggccggcgaggacgcggtgctggccgaggccatcgcgcgcagctgccggcacaaggccgccattgtcgagcgcgacccgttcgaaaagggcgagcgtgccctgctcaacctcggccacaccttcggccacgccatcgagaccgaacagggctattcggccccgggccgcgatgcactgaaccacggcgaggcggtggcggtgggcatggtactggcggcgaagctgtccaccgacctgggcctggccgacgatgccgaccgcgcgcgcctgcaggccctgctggaacgcctcggcctgccggtggcgatcccgggcgggctggagccgcaggccctgctcggccgcatgcgcctggacaagaagaacgtggctggccgcctgcgcctggtgttgtggcgcgggatgggccgtgccgaagtggtgccggacgtggatgaagcggcggtgctgaaggtgctgggcgcgggctgacctttccgcgttcgccgggcatggcccggcgctgacggattgtgctgcggcatgaagcgcagccgagcgtgggctcggctctacaggtccgtgccgccccggggcgatacaatcggcgccatgcacgtctacctgcaacatcccgatgccggcgcgcaggcaccgcgcttcctgcgcctgagcctgctgccggacctgttcggcggctgggagctgctgcgcgagagcggccgtgtcggcagccgctcgcagctgcggcgcgagctgttcctgcaggccgacgacgcccgccacgccttcgagaaggcccgtgatgccgaactgcatcgcggcttccagatcctttcgcacggcgactgacgccgctgctcctcccgtccaaggaatgcccatcgtgaccagccctctccgcaacgatcgcctgctgcgcgccctgcgccgcgaaccggtggactgcacccccgtctggctgatgcgccaggccggccgctacctgccggaataccgcgcgacccgggccaaggccggcagcttcctggccatggccaagaccccggagattgcctgcgaagtcaccctgcagccgctgcgccgcttcccgctggatgcggccatcctgttctcggacatcctcaccattcccgatgcgatgggcctggagctgtacttcgtcgaaggcgaaggcccgaagttccggcacccggtgcgtgacgaagccgccatcgcccggctggcggtgccggacatggaacaggacctgggctacgtgatggatgcggtacggctgatccgccgcgagctggacggccaggtgccgctgatcggcttctccggcagcccatggacgctggcctgctacatggtggaaggcggcggcagcaaggatttcgcgcgcatcaaggcgatggcgctgaaccatccgcaggcgctgcaccgcctgctggaggtcaccaccgaggcggtgatcgcctacctcggcgcgcagcgcgcggccggtgcgcaggcgctgcaggtgttcgacacctggggtggcgtgctgtcgccggcgatgtaccgcgagttctcgctgcgctacctgcagcgcattgccgaggggctggagcgcggcgaaggcagcgagcgcacgccgctgatcctgttcggcaagggcaccggcctgcacctggaagcgctgtcgcagaccggcgccgatgcactcggcctggactggacgctggacctggacgaggcgatgcgccgcacccgtggccgcgtcgcgctgcagggcaacctcgacccgaccacgctgtacgcctcgccggatgcgatcgccgcggccgccgcgcgcgtgctcgacacctatgccgccggcaacggcggctcgcgcgagggccatgtgttcaacctcggccatggcatgtcgccggacatggacccggcgcatgtacaggtgctggtcgacgcagtgcacgcgcacagccaacgctgagcattccgcatgcaggtacggcgcgaccttgatcgcgccgtgacccgcagtgcgcgatcatggcggcccccacgctgcaccggccgcaccccatgtccacatcgccatcgacctacaaccgccagcgtcccctgctgtggctggtgtccctggcgatcttcatgcagatgctggactcgaccatcgtcaacacggcgttgccggcgatggcggccagcctgggcgagagcccgctgcagatgcagtcggtggtgttcagctatgcgctggcggtggccaccttcattcccgcctcgggctggatcgccgaccgctatggcacccggcgcaccttcctggtggcgatcatcctgttcaccctcggctcgctggcctgcgcgctggcccagcacctgcaccagctggtcggtgcgcgcgtgctgcagggcatcggcggtgcgatgctgctgccggtcggccggctggcggtgatgcgctcggtgccccgcgaggatttcctgcgcgcgatgagcttcatcgccatccccgcgctggtcggcccgctgatcggccccacgctgggcggctggctggtcgagatcgcctcatggcactgggtgttcctgatcaacctgccgatcggcgtgatcggtttcatcgccgcgatgaagatcatgcccgaccattacgccagccaccgcacccgcttcgacctgcgcggctacgtcatgctggccttcgcgatggtggtgctgtcgctggcactggacggcatctccggcctgggtacgccacacgcactggtgatgctgatgaccgtggctggcctggccgcgctggtgggctactggctgcacgccgccaactcgaccgcaccgttgttctcgctggccctgttccgcgtgcccagctaccgcatcggcattctcggcaacctgttctcgcgcatcggcagcagcgcgatgccgatgctgatcccgctgctgctgcaggtcggcctcggcctgggcccgatgcatgccggcctgatgatggtgccggtagcggccgccggcatggtctccaagcagctggcggtgaggctggtcgagcgcttcggttaccgccgcgtgctgatggtcaacaccgtgctggtcggcctggcgatggccagcttcatcctgatgacacccggccagcacctggcctggcgcctgctgcagctggcgttcttcggcgcggtcaattcgctgcagttcaccgtgatgaacaccgtgaccctgcgcgatctggaccgtgagttcgccagttccggcaacagcctgctgtcgatggtgatgatgctggccgccggtttcggcgccgcagccgccggcagcctgctggccgcgttcggcaaccacctggacagcaacagcgccaccgccgcgctgcatgccacgttcctgtgcgtgggcgcgatcacgctgacctcgacgatgatcttctggcagctgcccgacaccaagcccgaaccgcggcaggtcgagcacgtcgcggagtgaagggggttcggcagggcctgcggccctgcacctgcagaggccgaagccgaagcaacagcaacagcgagcattccgcgggttggcggggcggtgcgggcttgcaggacacgccgtaaatcccgctccgcggtccggcccagccgccggcggctgcgcgttcgggcgcttgcgaagcagtgcttcgcaagcaaagcgccctcacccatggggactcgatggcgccatccatggcgccaacggtcctgcaagcccacaccgccccacctctgacaggttcacgcggctgtggataacggcgactgttggaacgcgcggttgttggtaggtgtcgaccttggtcgacacatctgtcagatatcgaattccagattggggtcagagcccgttgcgcagcaacgggatccgaccccgagctccgacagatcgcggaaaactgtcgaaggcgggcttttgacgttgacattgattctgcaggtgcaggactgcaagccctgcaataaaccctacctgcccatcgccttggcgatcgcttccaccagcagttcaccggtcaccggcttgcgcaggaagccgccgatgccggccgcttccacctgctgctgaaggtccggatcagtccgcgcggtcaccgccagcagcggcagcatgtagccctggttacgcaggtgctgggccagttcgaagccgctcaggccgggcaggtccagatccagcaggccgacgtcgaaatcgccggcactgatctcgcgcagcgccgccagcgcatggccggcatgcaccacctcgtggccgcgtgcgctcaacaacccccgcaccacatcggccacggtggcatcgtcctcgaccagcagcacccgcagcggtggcatgttcgccgcatcgtcgcgatgcccctcggcggacacctcggcgtcaccgtccaccaccagtggcaacggcagggtgacgccgaagcaggtgccccggcccagctggctctccacctggatccgcccctgcatcgcttgtgccagctcgcggcagatcgccaggcccaggccgctgccaccgtactgcgctgccgtacgtgcaccatcggcctgctcgaagcgtcggaacaggcgctgctgctgttcctggctgatgcccgggccggtatcacgtacctcgaaatgcagcgcgcgcagctcgccatcgcaacgtgcatgcagggtgatggtgccgcggctggtgaatttcactgcgttcgacagcaggttcagcaggatctgccgcacgcgcatggcatcaccggtcgcctgcaggcccggcggcagctggttgtccaggacgaagcgcaggcccttctgtgcagccagcgggcccatcagcgccgccagatcctgcagcaggccattcaacgcaaacgactgcgactgcagctccaggcgcccggactcgatccgcgccaggtccagcgcatcgttgaccagatgcagcaggtgctcgcccgcatgccggatcgactgcgtgtagccgcgctgctgcgggtccagtggcgaagccagcagcagctcgctcatgcccagcacgccggtcatcggcgtacggatctcatggccaaggttggccaggaagcgggtcttggccgccgaggcctgctcggccagttcctgcttgtgcagcgccagctggtaggcgtggcgccgctgcaggcggcgtcggtacaaccaggcgaaccagctggtcagcagcaacccgaccgacgccagtaccagcaggccggacaggctgcgccaccacggcggctgcacgcggaactccaggctctgcacccgcgaccacacatggtcggccgagcgtgcctgcacctccagccggtagctgcccggcgccaggcgcgagaacaggcgctcacccgccggaccgacttcaacccaatccgggtcgtagccggccaggcgataacggtaggtattggacgccgagtcggcgaaggacagcaatcgcgcgacgatgcgcaggtcgcgatcgccatcggcgatctgcaacggcgcatcgtgggtcatgtccagcacctgttcgttgcggcgcacttccacccgctcgatcaccagtggcgcgcgacgtaccgaaggccgtacctgctccgggtcgaacaccaccgcgcccgctgccgttccggccaccaggtggccatcggccgctgcgatcagggtgtgctcgcggaattcctggcttggcaggccgtcgtgcacgccgtacaggcgcacgctctgcccatcggcactgacacgtaccaggccgcgtgcgctggtcgcccaggccacgccctgcgcatccaccaccaggccagaggcggagatcgccggatagccctgttcggcaccgaccaccgcctgccgttccagccgcccctggctccagcggtatcgcgacaggcgcccgtcctcggacaaccagacctggccgtcacggcccacatgcaacgcatggatggccgttgccggcgcacccggcaccggctggaagcgttcgctttccggcagccactgcagcaggccacggctgctggccagccagatatggtcctgcggaccgcattccacatcgaggttgagctggccctgctgcaggccgcgctggccattgtccagctggcgccgcaggcgtccgtcgagatcacgttgctgcaggcccgcgggaagcatcaaccagaggctgtcgccgtcgcaggtcatcatcgcttcgatgaccccttccatcgccgcatcggtaccggcatcacggccccaacgacgcagttcgcgccgttgcgggtcgtagcgcaccagtgcatcggtcgatccgatccagacctggccacgccggtcctcgcgcaccgaggtcagccagtgcatgccgttgacccaggtgcggtgctgctcgatcctgccggtcttcggatcgaagcggtccagcgcgccatggctgcccacggtccagacaccgccattgctggacgggctggtgcccagcacgagcgcattgcgcagcgagctggggtcgtcctccagccgcgacagcaccgagaactgccaccagcgtggcagcaggtgccacaacccggcattggtgctggccagccagatgccaccttcgcggtcctcataggcaccggtccagttcggccgcaccggaccgcgtgcgatcgcgctgtacagcggcacggtctggtactggccgtcgaccgcacgtcccagcccggtgcgcgtatccagccaatgcccgccctgctcgtcgcgcagcatcatgcccagcacctgctcgcctggcggcagcttccacggtggtgcctcgaagcggccatccgggcggcgcacggtggccccggccatcgtgctgatccacaggctgccatcgggctcggcggtcaacccgttgatcagcaggctgggaatgatgtccgtaccgacacgctcgaagtcggtcccggtccagcgtgccacgccatgcttggtgccgatccacaggctgccatcggccagcgtggccaggtagggcaccgacgacgaaggcaggctgcgcggattgttcggctcgggcaggaagcgctgcaggcggtcctggctgtccaggcggtacaggccgccttcgtgggtaccgaaccagatcgagccatcaggcgtgctggccaggctccagaccgtgttggtgcccatcaacggctggctgctgcggtcgtagaagtgcagctgccggcggtcggccgacatgcgcaccaggccagcgttctcggtgcctatccacaactggttgcgggcatcgaccagcaccgtccagatgcggttgtcacgcagtccatcctcggaacgccacacgcggtaagtgcggccgtcatagcgggccaggccatcgttggtcgcgatccacaggtagccgtaccggtcctcggccatgcggttgacggtattggacggcaggccatcgaacaccgtcacctgccgcgggctcggaggcaccggctgtgccgcagcgggcaacgcgccgcacaggaggaccagcagcagcatccccgcccgcagatacaccaccgattgcctcctcacgctggtcctgatgattcccgcgctgcgggcgtcggcatggtaaaccgaaagtcacgccgttcacgcccggcgccggcacagtcacgcagttgcctgccgtttcgcacgcgcctgggcgatggccgccaccagcaggtcgccggtcaccggcttgcgcaggaagccatcgaagccggcggccagcacctgggtttcggcgtaggcatcggaacgggcggtcactgccaccagcggcagttcatagcccatggtgcgcagctggcgggcgatggccgtaccgtccagcgcgggcagatcgagatcgagcaggccgacgtcgaaaccatcggtggcgatctccgacagcgcacccaggccatgcagcacgtggaccacctcatgcccgcgcacccgcagcaggccggcgatgacctcggccaccgtggcgtcgtcctcgaccagcaggatgcgcagcggcggcagttccggcagggccgccacctcgcccgcggtgccggcggcctggcgcgtccagggcaggggcaggcgcacgcggaaccgcgcacccttgccaggctggctgtccacttcgataccgcccccccatcgccaccgccagttcctggcagatcgccagtcccaggccactgccgccgtagcgcgacgcggtgcgcggaccgtcggcctgttcaaaacgatggaacaggcgctgctgctgctcggcattgatgcccgggccactgtcatgcacttcgaaacacaggccgcccttctcttccaggcgcacggccaggccgacgtggccgcgctcggtgaacttgatggcgttgccgagcaggttcagcaggatctggcgcacgcgcatctcgtcgccgctgacactgaccggccctgccgggttttcaccgcgccggaattccagctggcgctgctgcgccatcggctgcatcaggccctgcacctggtcgaggagttcctccaggtcgaacggacgcagatccagctcaagccgcccggcttcgatgcgggccaggtccagcgcatcgttgaccagccgcagcagatggctgccggcctgctggatcgaccccgcgtagccacgctgcaccggatccagcggagtcgccagcagcagttcgctcatgcccagcacgccggtcatcggcgtgcgtacttcgtggcccagcgtggccaggaaacggctcttggcctgcgaggcctgctcggccagctgctgcttgtgcaccgtcagctgccattgctggcgacggcgcagccgcgcgcggaccgaccagaccaggaccaccagcagcagcgaccccagcaggatgtagccgaagatcgccatgccgctgcgccaccacggcggcagcaccttcacctgcaactgctgcgaaggtgtccacgcgccccgggcggtcgctgcctgcacctcgatgacgtagctgccggtcggcagccgcgacagggtgcgctggccatcgcccccctgctccacccagtcctggtcatagccctgcacgcggaagcggtaacggttgccctgcgggctggcataggacagcagccgcgcatcgatctgcagatcgcggtcatccggtcccagcaacagggtgccggtgagcggcaacggttgccagccgcgcgcgtcgtcgcggcgtacgcgcacttcggcgatcaccagcgatgaagaaggcagcaccgtgtcgtcggcattcacatcgaaggcaaccaacccggtctgggtgacggccagcacgcgaccatctgcattcactgccggtggccggccggtgaactccgcatcggacagtccatcgcgctcgttgaactgctgcaggcgccgcgttttcgggtcccaacgcagcaggccgcgcggcgtcgtcgcccacagctggccgttgccggccagcgccagcccgcccatggtgaccggcggcacgcctgcactgccgtcgatgcgctggatcaggcgcaggctcatgccatcccactggtagcgctcgaacgcgccttggcgcgccagccacaactgttgcggatcgatccacaccaggtcgtagatgggcccgcgcgaaacgcccggtactgcctcgaagcgtccagcctgctcgcgccagatgcccatgtcacccatcacccagggccggccatgggcgtcgaagcggatctgctcgatcggcgcatcggcggtcccgcggaaatgctccagcggatagcggtgcagcagccggccctctgcatcgcgctgctgcaggtccaggcccatcaccgacacccacaccgtgccatcaggcgcctgccgcatcaggtcgatgcgctggcgcaggtcggcactgccatcgatccgcagatcgcgcagcgcgccggtagccggatcgtagacggtgatgcggccgccacgtcccagccacaggcgcccatccgggcgcggcagcaccgaccacaccacgccgctgccgagctgccggtcgctggccagcaggcgcagggtgccctgcgcatcgagctggtacacccctcgcgccgagccgacgtagtagttcttcccatcgctggccgcgctcaacaggtactggctgtccagcggcttgccgtcgagttggttccagatcgagaagcgccgccagtccggtggcagataggccaggccctgggtcagcagcgccacccacaatccgccctcgtggtcctgcagcagatcgagcacaccgctgtgcgcggtcaggaagccgctgccgcggtcgccctccagccggcgcagcgccgccgcatccccccgcaacaggccatcggaggtgccagcccagtagcccccctggcgatcggccaggaccagggccgagcgcagctgggcgctgtcggcccatcgcggacgactgacccggtcctgcccatcgatgcggtacaggccatcgttctggctgccgacccagatcgaaccctccgcatcccggctcaaccggagcacgctcagcgtgcccagttcccgcgcggccaccggctcgaatccgctgccgttccaacgcgccacgcccgcttcggtgcccagccacaggcggccctgcgcatcgaccaggctggtgaagatgctgttgctaggcaggccccccggctgcgccgggtcatgggtgtagaggcgcacgctgccgtcctcgccaagccggcagacgccatggttgttggtcccgatccacaaggcgtcgtcgacataggccagcgcccagaactgcccctggcaggtggaattgaccgtgtcgaaggtccggaagcgctcgcggtcggcatccaggcgggccacgcccttgccgttgatgcccacccagacccggtccagcggatcgatcagcagggtctcgatctcgttgccgggcagcgagcccggctgttccggatcgtgctcccagacccgcaggctgttgccgtcataacgggcgagtccaccatcggtggcggcccagatgtggccctggcgatcctcggccagcgccaccaccatgcgtgacggcaagccttcggcggcaccgaagcggcgcaggcgcggtgtttctgccatgtccagggtcgcagccgccgtggccatcgccatcagcagcagtcccatacctgcgatgccacggcaccaccggcgccagccgctcgtcatcctgaaccccctgtcctgggccgattgtcacacagggccgggttcatggctgcaacaggctgtttccagcggcggcaccaccacgaactgttgcagccatgcacgcaacgttggcagggggctgtgcgtatgatcacagcgtcaccttccggagcccgccatcgatgcgtccctgcctggccctgctgccgatgctgctcgccaccgcccctgcctgggcggccgccgacacctatcgcctcgatccggtgcacacgcgggtgctgttctccatcgatcacgcgggctactcgcaggccatgggcaccgtgtccggcagcgagggccgcgtgctgttcgatcccgacaactggcgcgacgccaccctggaagtggacattccggtgtcgcgtctggaccttggcgacgccaagtggaaccaggccacgctggcccgcagcctgctcgatggcgagcgattccccagcgcacgcttcgtctccagccgggtcgaaccgatcgacgccaagcgtgcgcatgtgatcggcacgctgacccttcgcggggtcagccaggaagtcaccctggacgtgaccctcaacgcgctcaagcgctacccgctccctccattccgacgcaccgccgggttttccgccagcacgacgctgagccggcgcgcgttcggcatcaccgcctggccgggggtcatcggtgatgcggtacaggtgcggatcgaggccgaagccaccctcgaccgcagcgacgccccgggaactcccgctcccgttccacactccgaccacacgacggcccccaaggacccttcatgaccgccaagaacacccccgccgcgtggggaagtgtcagccagctcctgcactggttgatcgcactgctgatcctcgccctgggcgtggtcggcctgatcatgggcgaactgcccaagacgcccaagtacttctgggtctacaccgcgcacaagtcgatcggcatcaccgtgctggcgctggtgctgttccgtctcggctggcgcctgtatgccggtgcgccgaagccggtgccgggcgtgcccagctggcaggaacgcatcgccagtgccacccacgtgctgctgtacgtgctgatgtttgccattccgctgtcgggctggctgtacgattcggccagtggcctgcgcccgttccgttggttcggcctggtcgacgtgcccaagctgagcggccccgacccgcaggtcgtcgcggtgtcccatgccctccacgaatacggcttctggctgttgatcgcggtggtgctggcccatgccggcgctgccttctaccaccacctgttccagcgcgatgcaacgctgtcccgcatgttgccgcgcggctggctcgcctcccctcagaaggactgaccgatgaacctgaaactgaccactccggccgccgtggccgccgccctggccggcatgctggccaccgccccggcgctcgctgcggagtatgcgcaggcccccggtgccggctcgatcctggtgttcgccagcaagtacgacggcgaagtgttcaccggcagcttcccgggcttcgccaccaagctcagcttcgacccggccaacccggccgccggttcgctggatgtggtgattccgctggcaggcgccaggagcggcaacagcgaccgtgactcgaccctgcagggcgccgacttcttcaatgtcggcaagttcgccaccgcgcgttacaccgccaagggcttccgcgccgtgggcaacgaccagttcgccgccgatggcaccctggaactgcgcggcgtcagcaagccggtcaccctgaccttcacctggaagccgggcacccagccggtgctgaccggcaaggccacggtcaagcgcctggacttcggcgtcggcggcggtgactgggccgataccaagaccattccggacgacaccgcgatcagcacgatcgtgaagttcgacgcgaaataagacccatccggtgatgccgtgcccgcggccggcatcaccgggcatcgcaacgcatccggtagtgccggccgctggccggcatcaccgggaacagaggggttgccggccagcggccggcactactgatcgacggccaaccaggcctgcaccgtggccgcatcgaacggccagtccagctcgcgctcgccgcgctcgtcgcgcagcaccggcacccgcgtgccatagcgcgcttccagcgccggctggtcatccaggaacaccgattcgaactccggcgcccgcgccttggccagctcggccagggccaggtcgcacaggtggcaatcgtcacgctggatcagggtcagcaccagtcaggctcccgtggcggaaatgctgcgccgcagccatcggatggcccggcaagccgctagaatagccgcttgtccggtacccgcagtttggcatccatggctgtcagcacgttcgacgttttcaagatcggcattggcccgagctcctcgcacaccgtcggaccgatgaaggccgccgagcgattcatccatcgctggctgctcgacccgggccgcctgcacgaggtcgcgcgcatccgcgccgatgtctacggctcgctggccttgaccggccgcggccatggcaccgacaaggcgatcctgctgggcctggaaggccaacggcctaacctgatcgacccggacatcattccggccaccctggagcgcatccgcagcagcaagcgcatccagctgatgggccagcacgagatcgccttcgacgagaagcgcgatctcggcatgaacaagcgccagaagctgccctaccacaccaacggcatgcgcttcaccgcgtacaacgccgacgacgaagtgatcgcgacccgcgattactactcggtcggtggtggcttcgtggtcaaccaggacgacgcggccgatgaccgcatcgtgcccgatgaaaccccgctgccctacccgttcaagagcggcgacgagctgctggcacagaccgcgcgcagcggcctgagcatcgcccagctgatgttcgagaacgaaaagtgctggcgcagcgaagacgagatccgcgcccagctgcgcgagatctggagcgcgatgcagtcgtgcgtcacccgcggcatccgcgaggagggcgtgctgccgggtggcctgaaggtcggccgtcgtgcaccggcgctgtaccgcgagctgtcgtcgaagccggaagcggcgatgcgcgatccgctgacgacgctggactgggtcaacctgtacgcactggcagtgaacgaagagaacgctgccggtggccgcgtggtgaccgcaccgaccaacggtgcggccggcgtactgccggcggtgctgcattacttcgaccgcttctgccccggcgccaacgaacagcgcgtgttcgatttcctgctgacctcggcggcgatcggcatcctgtacaaggaaaacgcttcgatttccggtgccgaagtgggctgccagggcgaagtgggcgtggcctgctcgatggcggccggtggcctggtcgcggcgctggggggcaacccgagccagatcgagaacgccgcggaaatcggcatggaacacaacctgggcctgacctgcgacccgatcggcggcctggtgcagattccctgcatcgagcgcaatgcaatgggcgcggtgaaggcgatcaatgcctcgcgcatggcgatgcgtggcgacggcaagcacaaggtgtcgctggacaaggtcatcaagaccatgcgcgataccggccgcgacatgcaggacaagtacaaggaaaccagccgcggtggcttggcggtgaacgtcatcgagtgctgagggcgaccggctccggcgcgatggcgacgggccacaggtagagtcgactgtcagtcgaccatcgcgcgcagcgcgggatttccgcggcctgagggaagagcagtcgaccaacagtcgactctacccggtcacccttgcccgtacgggcgacaccgtcaccgcgttccggttaggctcggggcttccccaccccggattgccccatgcgcgtgatcgctgccgccctgcttgcctgccttccgctggccgccctggccgcccccacctacgggcctcggctggagggtttcgactacggctatccggtgaagaccttcgcgctggaatcgcagcggcagccgctggagatggcctacctggacatcgcgccgaagaaggcacccatcggcgtggtggtgctgctgcacggcaagaacttctgtgccgccacctggaaggaatcgatcaagccactggtcgccgccggctatcgggtgatcgccccggaccaggtgggcttctgcaaatccagcaagcccgagcgttaccagtattcgttcgcgcagctggccgccaacacccatgccctgctgcaacagctgcaactgggtgacgtcccggtgcacctggtcggtcattcgatgggcggcatgctggcggtgcgctacgcgctgatgttcccgcaggacctgcgcagcctgtcgctggtcaatccgatcgggctggaggactggaaggcgctgggcgtcccctggcgcagcgtcgacgcgtggtacgccggcgaaatgaacatcagctatgacagcatccgccgctaccagctggaggtgtactacgacggcaaatggaaaccggcctacgaaccgtgggcgcggatgcagtcgggcatgtacgaaggcccgggcaagcaggccgttgcatggagccaggcgctggcctcggacatggtgttcaaccagccggtggtctacgaactgaagcacgtgcaggtgccgaccacgctgttcatcggccagaaggaccgcaccgcgatcgggcgcgacctggcgccgcctgcggtgaaggcgacgctgggcaattatccggtgctgggcaaagcagcggccgcagcgattcccggcgcgacgctggtcgagttcgccgaactgggccattcgccgcaggtgcaggaccccaagcagttcaacagcgcgttgttgaaggccctgaagtcccgctgaccggcaggcgtgccctctgtagagccgagcccacgctcggctcatgcggcaggaccggggttctgtcaggagcagccgagcgtgggctcggcgctacaggaacaatgcgatcaacccacgatccgcagcacgtcatccagcaacgcagccgcagtgacttccgcgccggcacccggtccctggatcaacaagggttggtggcggtagcgatcgctgtggatggccacgcggttgtcggtgccggcaccctgcgccagcggatgatcggccggcagttcgcgcaggcccacctgcgcaccttcgctgtcaacacggccaacgaaacgcagcacgcggccgttgtcacgtgcctgctgccaacgcgcctgcagcggcgcatccagctgctccaaggcagccacggcatcctccagcggcaacgctgccagcgcttcgggcaccagtgaatccacctgtacctgcgacgcatccagcgccagcccgctgctgcgcgccaggatcagcagcttgcggcgcacgtcctcgccggacaggtccaggcgcgggtctggctcggtataaccggccgccagcgcctcgcgcaccgccgccgagaacggcgactggccgtcatagcgatggaacagccacgccagcgagccggacagcacgccctcgatggcatggatgtgatcgccaccggccaccagcgcgcgcaggctgctcaacagcggcagcccggcaccaacggtcgcactgtcgccataacgcgcgccactgtcggcacagctttcggcaatggcctgcgcgcgggcgagctgcgcgccccggcccagcttgttggcggtcaccacatgcacgccgcgcgccagccattgcacgtgacgggcggccacgtcttcactggccgtggcatcgaccaccacgtcgccacgctccagcccttcggcgctcgcccatggtggcgaactgtggccatcgcggggggctcgacgtgccagttccaagggcagcgccaggtcgcgatcgatctccagcgcggtgcgcgagttggccagccattgcacgctgggcagttccaacccgcgtgcctgcagcgcctggtagcgctgtacgaaggccgaaccgaccgtgcccgtaccgagcagcgccaggcgtcccgcccccagcgcaggaatgtcagcggcgagtgcgctcatgcgtccaccacctgtttgcggcgggcggccgcatcgatcaccgcttcggcgcgctgcagcgcggcgccgagatcggccagcaggtcacgctcggcctcgatgccgaccgacaggcgcagcagcccttcgctgatgccggcggctgcacgcgcttcggcggtcatcgccgcatgggtcatcgtggccggatgtgcgatcaggctttcgacgccgcccagcgattcggccagggtgaaacagcgtagcccgtccacaaatgcacgcaccgccgcatgcggatcatcaccggcgcagtgcgccagttcgaatgacagcatcgcgccgaagccattctgctggcgcgcggcgatggcgtggcccgggtgatcggccaggcccgggtagtacaccgcgccgaccgccggatgctggtccagcagggcaatgatcgacgccgtgttttcctggtgcacgcgcaggcgcgcatccagcgtgcgcaggccgcgcagggtcaggaaggcatcgaacggcgaaccggtcaggcccagcgcgttgccccaccacaccagctgctcgtgcagcgccggatcgcgcgcgaccaccgccccacccaccacatcgctgtggccattgatgtacttggtggtggaatgcagcaccaggtccgcaccaaacgacagcggctgctgcagcgccggtgacaagaaggtgttgtcgaccaccacgagggcaccggccttgtgcgcggcatcgatgacgaagcgcaggtcggtgatgcgcagcagcgggttggacggggtttccaccagcaccagctttggctgcgtggccagcgcctgcgccagcgctcgcggatcggtcaggtcggcggtgaccagttcgaagtgccccttctttgccaacgcgttgaacagccgccagctgccgccgtaggcatcgtgcggcaccaccagggtgtcgcccggctgcagcagcgcgttcagcaccaggttgatcgcgcccatgccggtcgcggtgatgacgccgccggcgccgccttccagttcggccagcgcttcacccagcaggtcgcgggtcgggttgccactgcgcgtgtaatcgtactggcgcttgttgccgaagccttcaaaactgaagttcgacgacagcacgatcggcggcgtgaccgcgccatgcgcggtgtcccgatcgatgccggcacggacggcggcagtggtacgactacaggacggctcgttggcgtgcaggctcatgcggactctccagaagtgcggaaggcggtggcgaggatcgcatcgatgcgatcggtttctttgaggaaggcatcgtggccatagggcgagcgcagcacgcgcaggctgccgcgcgggcccagcccttcgaccaggccgaccaggtcggccagcggcaccaggcggtcgccctccacggccaccaccacggtcggcggcaggatcgcggtgggatcgacgcggtgcaggtcgattgattcggacaggcgcaggtaagcggtcaccggcgtgcgcgcgacgtactgcgcaccggccgcgtcgagatagtcttcggcagccacgcgcacgcggccattgatgacctccggcgcagcatcaaagcgctcgccgaactcttccggggtgcggtagctgagcatggcgaactgccgggccagggcaaggccgtggtcttcgccgcactgcagctggcccagcgcgaccgcgcggcgctgcaatgcgcgccaggcggcggcatacggatgcggtcggtgcgcaccgctggccagcaccagctggcgcacgcgggcacgatgacggatcgcgaactgctggccgaccagcgcgccatacgaatagccaacgaaggccttcagcgtgcggatgccgagatggtccagcagcagcgccaaggcatcggcctggtcggcggtatcgatcggcacatcaagtgcaccgtcggcgccgatgaagtcgaaggccagcacgcgcagctgctgcggatccagcgcgcggccgctgcccaccaggtcttcggcccagcccttctcgcggaactgcgtgttggacgccacgtggcgatgggcggaaatgccgccggccagcaccaccaccggtgcattggccggaccgacccactcatagcgcaggcgcaccgggctggggccggcgtggcgcatcgacagcaccgcggcgaactcaccgcgctcggcatgcacgcggtcttcgaccggcacgctgacggggacaaagggttcggggcgaatggcggtactggcggcgaagctcatggcgggatccggttggggaatcggccatcgagccttcgcggggcccgcgttcgagatgcacgtgtggtgcatggttcgaaccatctttcggtggacgccacggtccccgcaggatttggcacctacgcagacgcttgcgcgcctgcgggctgccccggcttcaaagggcctgtccctctgccggtctcgatggtggggccacgatgccagccctttccggcactgtcaatcccttcatgcggataaagcgatgaatattcttggggcagctatgcgaaggccgtcccggtcgccctgttcaggatcgggtacagtccgggcggtccattccgctggaaacgccgatgtcgcgcctgcccctgtcctgcctgctgctgcctctgctggcgagcgcgaccgcacacgccggcgactggcgccagggctggggactggctcccccttccgccccggccacccgcgcaggcagtgccgagggcgccgcccccatggcccaattgcgcctgcagccggtcggtacgcaatggcaggcccggatcgacaacgggctggcagggccgctgcagatccagctgcgcgccgccgccgggcacccggtcgaaggcctcccggtcgagtcgctgatccagggcgacagcagcctggtagtcggccacctgcccgccccgatcgatggccgcatgctggatctgcgcctgcagtcggtgccgggcaacccggccgcacaggccgaagatgtcgcctaccgcctgccattcgatgcggcgcgcctgcgcgtggaccaggcgccgcagggacgattcagccatgacgacgaggagaaccgcgacgcggtcgacttcgcactgccggagggcaccctggtgctggccgcgcgcgagggtacggtgatgcagatccaggatggcttccgtggcaacggccaggaccgcgaacgcgatggtgcccgcgccaacttcatccgcgtgctgcacagcgacggcagcatggcgctgtacggccacctgcaggccggcggcatgcgcgtgcgtcgtggccaggcgataggggccggacagccgatcggcctgtctggcaacagcggctacagcagtgccccgcacctgcacttcgtggtgcaggtcaatcgcggcatgggcctgcgctcggtgccggtgcgcatcttcgccgagcagggccagctgcagttcgcccgccagggcgaggccgaaggcggtaccgggcgctgaccgcccccggccggtataatcgggcgcttatctctttgaaaagcgccccgggcgggcgccactgccatgtccgaagtcgccaacgaagcgtcgcgtcgccgcaccttcgccatcatttcccaccctgacgccggcaagaccacgctgaccgaaaagctgctgctgttcgggggcgcgatccagatggccggttcggtcaagggccgcaaggctgcccgccacgccacctccgactggatggcgctggaaaaggagcgcggcatctccgtcacctcctcggtgatgcagttcccgtatgaaggcaagatcgtcaacctgctcgacacccccggccacgccgacttcggcgaagacacctaccgcgtgctgaccgcggtggactcggcgctgatggtgatcgacgtggccaagggcgtggaagagcgcaccatcaagctgatggaagtgtgccgcctgcgcgacaccccgatcatgaccttcatcaacaagctcgaccgcgagggcaaggacccgatcgagctgctggatgaagtggaaaccgtgctcggcatccagtgcgcgccggtcacctggccgatcggcatgggccagcgcctgaagggcgtggtccacctgctgaccggcgaagtgcacctgtacgaaccgggccgcaacttcacccgccaggactcgaccattttcccgtccatcgatgctcccggcctggccgagaagatcggtgcacagatgctggccgacctgcgcgacgagctggaactggtgcagggcgccagccacccgttcgacctgcaggcctaccgcgagggcaagcagacgccggtgttcttcggctcgggcgtcaacaacttcggcgtgcagccgctactggacttcttcgtcgaacacgcacccgcaccgcaggcgcgctccaccaccggccgcgagatcgccccggaagaaaacaagctgaccggcttcgtgttcaagatccaggccaacatggacccgcagcaccgcgaccgcgtggccttcatgcgggtctgctcgggccgcttcagcgccggcatgaagaccttccacgtgcgtaccggcaaggaaatgaagctggccaacgcgctgaccttcatggccagcgaccgtgagatcgccgccgaggcgtggccgggcgatgtgatcggcatccacaaccacggcaccatctccattggcgataccttcaccgaaggcgaagcggtcaccttcaccgggatccccaacttcgccccggaactgttccgccgcgcccgcctgcgcgatccgctcaagctcaagcagctgcagaagggcctggcccagctgtccgaggaaggcgcgacccagttcttccgcccgctcaccagcaacgacctgatcctgggtgccgtcggcgtgctgcagttcgacgtggccgcctaccgcctgaaggacgagtacggcgtggaagccaccttcgagccggtgagcgtgaccactgcgcgctgggtccactgcagcaacgagaagaagctggaagagttccgcgagaagaacgcgctgaacctggcgctggatgccgccgggcacctggtctacctggcgccgacccgggtcaacctgcagctggcccaggaacgctcgccggacgtgcgcttctctgccacccgcgaagcggcgcataccgtttcggcaggctgatgccacggggtcggatccctttccggcaggaaagggctctgaccccagccaacgcaaggcaggcattcacccaccatacggtgacaggcgtgcacgcatcgcccatcgcggcgatgataggtgggtgcgggtccccctccccgcgaacaatgcctacgccatgtccacgacgtccattgattcgatccgtgaagaaatcgccagcgccctgacccatggcctgggcgcggtattcgccctggcagccagcgcggtgttgatcaccctggcggcgatctacggcgacggctggcagctggccagcgcgatcgtattcggtatcgcgctgttgctgctgtacaccgcctccacgctgtaccacgccatccagcatccggtcgccaagggccggttgaaggtgttcgaccattgcgcgatctatgtgctgatcgcaggcacctataccccgttcaccctgatcggcctgcgcggtccgtggggctggggcctgttcaccgcgatctgggcgctggcgctgggcggcgtggtgttcaagctgttctacaccggccgcttcaaggtgctctcaacggtgatctacatcgccatgggctggctggtggtcgtggcgatcaagccgatgtgggcctcgatcgatggcggcaccctcacctggctgttcgccggcggcctgtcgtacacgctggggacctatttctaccaccgtgaatcgatcccgtactcgcatgccatctggcacctgttcgtgatcggcggcagcgtctgccacttcgtcgcggtcaccatgcaggtgctgtaacggccgctcgacggcagcgcgtgcacaccatgcacatggtcgcttcgcgccctgtccacgaagagggggcaaccatggcagcgtgaatgctgccgcctcccctgccgcaaagcgcacgccccgctggcgcctccgccgccccggcccacgaggccggcgctggctcacgatcctgatcttcctgctggcggcgatcctggtactgatcgcgttgtgggactggaactggttcaaggggccggtggagcgcgcggtgcaggcacgcaccggccgcgtgctgcacatcgggaaccttgatgtcgacctcggccgcaccagcacgatccgcgccgatgcggtcaccttcgccaatgccagctgggcgaaacaacccgatatggccagcgccgaccgcgtcgagatcgacgtgcgggtctggcccctgctgcgcggcagcgtgcagctgcccgaagtgcgcctgacccggccggacgtgctgctggaaaccgccccgcgcaaaggcgaaccgggcaactgggattttctcggtgacagcgccggcgggaccagcccccagctcaaacggttgcgcgtcgatgacggtcgcctgcagttcctcgatgcgctcggccgcaccgatatccgcgtggacgtgcgcagcggccagccggaacaggccgacgcggcgccaccgctgctggtgcagggcaagggacgctggcagggcaatccgttcaccctgcgcggtggtactgaatcaccgctggagctgaccgacagcggccacccgttccgcatccacctcgacggtcgcgctggcgccacccacgccgtcgccagcggcacatgaccaatcccttccagctgcgcgtgttcgacctgcagttcgcgctcagcggccaggacctggccgacctctaccccttgctcggcatcgccattccgccgtccccgccctacgcgttgaatggtcggctcaagcgtgaccacgacctttggcgttacgagcagttcaccggcaaggtcggcgacagcgacctcggtggcaacctgcagttcgaagtgggaggcgcgcgcccgcgactgaccgccacgctggaatccagacgcctggacttcgatgacctggccggcttcgtcggtgcgccaccgaagaccggcggcggcgaaaccgccaatgcagagcagaaggccgaggccgcacgggtcgccgcgcgtgcgcgtgtgttgccggacacgccctacaacctcggcaagctgcgtgcgatggatgccgacgtgcgttggaaagcccaccgcatcaacgcgccgtcattgccattggacgacatggatgcacacctgttgctggatgacggtgtgctgcggctggacccactgaacttcggcgtcgccggcggcgacatccgcagcacgatccgcatggacgcgcgccagccgcagatcagtaccgcgctgaaggccagtgtgcgcggcgtgcagcttggccagttgttccccgacgccaagctggccgaacaggccaagggtggcatcggcggcgaggtggacctgagtggccgcggcaattcgatcgccgagatgctcggcagcagcagcggcaaggtcggcctggcaatgggccgtggccatgtcggcaacctggtgatggaactggccggcctggacatcaccgagtcgctgaaattcctggtgaccggcgacaagcagattcccctgcgttgcgccttcgccgacttcggcgtgcgcgacggcctgatgaccagccaggcgttggcggtggataccaccgacacgatcctcatcggcgaaggcacggtcagcctgcgcgacgagagcctggacctgctgttgaagccacgcccgaaggacaagagcatcctggtgctgcgctcgccactgcacatcgccggcactttcaaggacccgtcgttccgcccggacttcaaggcgctgggcatccgcggcgcggtggccctggcactgggcagcatcgccccgccggcggcattgctggcaaccatcgaactggggccgggcaaggatgccgactgcggggggcagtatgcgaagtaggagcgttcgttcgtggcgcctggactgatcgtggtttgagggggacgagtgacagtttcctgcgcgcgcggaacgagagcggaaattcaaagtcaaaagaaaaaagcaaagtcaaaagctgttgccaaccaaggttggcagctaccaaaggcagtcaaccgacgcggcaacccaccgcactcgcgggacgagtcctgaggcggagtgcatggccgtgcaggaccgttggcgccatgggcccgaggcatgcctcgggcgggttgggcaggacgcccaaccccggtcttgccgtgtgcgcaggacagcgcacacgagcaaggcgccatcgagcccccatgggtgagggcgctttgcttgcgaagcactgcttcgcaagcgcccgaacgcacagccgccagcggctgggccggaccgcggagcggggtttacggcgtgtcctgcatggccatgccctccgcctcccccgcatcaggaaggcgctgctttggctttggctttggctttgagcttcgaaaagcgggccggcgggccgcaggcccgccggtgaacacctcaccccgccacgatgtactgctgcagctggtccagctcgcgccgctgcgcatcaatcaccgacttcaccaggtcaccgatggagatcacccccagcacctgcgcgccctccaccaccggcagatggcggatgcggtagtcggtcaccagttgcaggcaatgctccacctgctcaccgggcgacaccgtcaccacctgcgccgtcatgatctccgccaccgcggtatcgcgcgatgaacgatcacgcagcacgatcttgcgcgcgtagtcacgctcggacaggatcccgaccagccgcggcccgtccatcaccagtaccgcaccgatgcccttttccgccatcaaccggatcgcatcgatcaccgccgcgtccggcgcgaccgcatgtacttcaggagacttgccatccaacagttgccgtaccgtcgtcatctgcctgccctccgagggtgggttgcagggccgagtctgccacggcggatgctagccacgcgtcaaccaggtacaacggccgctgcttggactcttcgtacagccgccccaggtactctcccaccagccccagcgcgatcaactgcactccccccaggaacaggatcaccgccatcatcgtcggccaacccgccacccggtcgccatacagcgccgccttcacgatcacccacaggccgaacacgaacgcgactgcggcggttgccagtcccaggtaggtggcagcccgcagcggcacagtcgagaagccggtgatgccttcgagggcgaaattccacagccgccacaggctgaatttgctggtgccggccacgcgcgcgtggcggtgatagggcacggcaatccgcttgaagcctacccagctgaaaagccccttcatgaaacggtggcgctcacgcatcccgcgcagggcgctcagcgcgcgcggggacagcaggcggaaatctccggtatcggccggaatcggcgtacgcgacaggcgacccatcacccggtagaacatcgctgccgtggcgcgcttgatccaggactcaccatcgcgggccatgcgcgtgccgtagacgttgtcatggccctcgcgccagcgcgcgacgaattgcggcaccagctccggcgggtcctggccgtcggcatcgaggatcatcgctgccccctcgtgcaccagatccaggcccgcggtcagcgccgcctccttgccgaagttgcgcgacagcttcagcgccgagacgcgcgcatcagcctgggccaaccccgcgatcacctcccatgtgcggtcatgactgccgtcatccacatagaggatgtggccgtcgatgtcgggcatgccgtccagcaccgcgcacagccgtggatgcagcagcggtaatgccagggcctcgttgtaggcggcgatgacaaaagtgagccgttcgcgggtcatgcccggattgtacattgccggccaggcgcacgacccgtcgcccgccgctcacgccacgcctgcctcagtcctccgacaagtatgacgcgcctcccagctggcgcgcctggcgctggatccatgcggcgcgccgctgcacatacggccccggtgcggccgcgttgtagcgtcgcggtgccggcagtaccgccgccagtcgcgcactctcggccgggctcaaccgggccgcgtccttgccccagtatttctgggctgccgcctgcgcaccgtacacaccatcaccgaactcggcgatgttggcgtacatctccaggatgcgctccttcggccacagcgcctcgatcagcaccgtgtaccagacttccaggcccttgcggatccagctgcggccctgccacaggaacaggttcttggccacctgctggctgatcgtgctggcgccacgcaggcgccctcccctggcgttatggtcgcgggccttttcgatggcctgcagatcgaagccattgtggtcggggaagcgctggtcctcggccgccaccagcgagatcggcaggctcggcgccatctggtcgaggtcgcgccactggtaatgcagccgataggaccagtccgcctcgcccagcgcctcgccgtagcgccacagcatcaccgtggacaccggcgggtcgatgaagcgcagcaccagcacctgcaggcagctgaaagcaaccagcagcaccggcagccacttccagcgccagcgtcgccggcgcggtgcggccacctccgccactaccttgtgctgctctcccgctgcccccattactggtgcatccttcttctgtctggttgtcggcgcattatccggcaaccgcccccgtttacgcgcgatgtgagccgatgaccgccaactccgattccctgatccgtttcctgctccccgacgccggcgtccgcggcgtgcatgtgcacctgcaggccacctggcaggaaatcctgtcccacgccgtgtacccggacgccgctgccgagctgctcggcgaggcctgtgtcgcctcggccctgttcaccggccacaccaagatcgacggccgcctgtcagtgcagctgcgcagcagcactgccctgcgcaccctgttcgccgaatgcaccgcgggcggcaccctgcgtggcatcgcccagctcagcgaaggcgccgacgcgccgcgtgacctgtccagcctcggcgatgacgccatcctcgccatcaccatcgagaaccccggcctggacccgcgcgagccgcagcgctaccagagcctggtcgcgctgaccgcgccggaactggacgaggccttcgaggactacttccgccagtcggagcagctgcccacccgcctgctgctggcggccgaccgcaacggtgccgccggcctgctgctgcagaaactgccgggcgacgaaggcgacgaagatggctgggcgcgcgccagcgccctgttcgagaccctgggcaaggccgaactgctggcgaccccggccgagcagctgctgcaccgcctgttccacgaggagcggccggagctgctgggtgaaaagccgctctccttcgcctgctcctgctcgcgcgagcgggtggccggcatgctgcagtcgctgggggaagaggaggcccgagcggccgccgaggacactggcgccgtcgaggtgcgttgcgaattctgcggacgcgagtatcactttccattgacggagttcggcatactgttccacggcgcccagggggctgtaccggcgcctgaacgacttcagtgaacggcagtcttgtacctggggaggatcaaggcttgttaagaattcataaacaccctaggatcgagttcccgtccccacgggaacttccgttgtctgtccctgtctgaactggtccgatgcgtaccttcctgcgtctaccgctggccctgctgatcgcccttggcgcgatcacgggcgtgcatgcgcagagcaaggacacccgcaccgtgctgccggtctggaacaagggcagcggcaaggtcgaggcgctgctgtaccttgagccgaccggcgaacaggcggccggcgcccgctggcatttcggccgcaactcgctggacgcggcctttggcctgtcctccggcgattcgctgggcctgctctgcaacagcagcagcggcaccagcatcagcggtctggccagccattgcatgctggccagcctgggcgacgaggatgatctgaacagccgtcgtttcagcggtaccgccgcgctgaaccgcggcaacagccgcctgggcatcaccgccggcactggccgtgaaaccctgcccgcctggttgtcgggcccgaacaagacgccctcgctgcgtgccgagcagaacgatctgaccgtgttcgcgcagaagaacatcggtcgcgaaggcttcgtctccatcgccggtacctacgccaaggcgcgcctggttccgctggccgacgcctcgccggccatcgtcgatcgctgggacagcaagagcctgagcatcggcgccggttacggcaacttcaccggcagcatcatcggccgcgtggtcgacgtcccgggcaagcccggcaagtgggaaggcctgggcatcggcctgacctggcgtaccccgtggtccggccagctcaccgtcggcgccgagaatgtgatcagccgcggcaagaatccgttctccccgcgcaacgaaagcaacgacgacggcaccgtgccgtatgtgcgttacgaacaggatctctgatcccggtaaacaggctcagcaacgatattcccaaaggcgccgaaaggcgccttttgcatgtgcaagcctgccgcgcacttgcgtaaccggtatcgccgctgggcgatgaaacgctgcgcaccgacatagtgagacacatttcaatcgaaacttttttcatcattctgcgttaacaaacgaggcagagcgccctgaccatgccggtaaactattgagtggcatggaaaaagcgcatctttaccaaaatcacaggcttgattaacacagctttaattcttggcgaacgcccgttactatcgggtcagcctcgcgatttgggagcgctttttcgctcccccgccgggcattaaccccagccaagatttcttggagagagagagccaatgaaactcaagtccagccagctgcgtgacgcagttgtgatcgcgcttgtcgccggtgccaccaccgcgacggcgcacgcccaggaagccaccaacctcgaccgcatcgaggtcaccggttcgcgcatccgtcaggtcgataccgaaaccgcccagcccgttctgagcatcagccgcgcttcgatcgagaagagcggtttcaagacggtcgccgacgtcctgcagaacatcgccgcagccggcagcccggccatcagccgttccgagccgctgtcctccggtgaagccgtcggtggcttctacatcgacctgcgcaacctcggcgccgaacgcaccctggtgctggtcgacggcaagcgcctcggcgccagcgtcagcggcctgcaggacgtgtcgcagattccgtcggccatcgtcgagcgcatcgacgtcctgaaggacggcgcgtcgtcgatctacggctccgacgcgatcgccggtgtgatcaacatcatcacccgcaagaacttccagggcctggaagccaacgcctacgtcggccagtacggcgaaggcgacggccagaagaccagctacgacttcgtggccggcttcaccggtgaccgcggttcgatcaccatcggcgccgagtacgccgaagaaaaggaagtgtgggccaaggatcgctggttcagccgttatccgcgcaccaccttccacccggcccagaactggagcccggtcagccagtggggcaccatcatcgatccggataccgatgactggctggtgctgaaccgcggtggcgactaccgcgacgtcaaccagtaccacgaccaggacttcgccggcatcaccggtgacaccagcaactccaatacgcagatgcacctgctgacgccgaccaagcgtcgctcggtgttcgccaacgtccagtacgacctgaccgacaatatccgcttcgtctccgacctgctgtacacccgtcgtgagtcgcaggcccaggtcgcaggctatccgttgcagtctgcgtcgtatgagcgcctgggtgccaagtgggatgccgacagctactacaaccccttcggcaaggacatgggcttcatgcgccgtggctgggaagtgccgcgcctgtcgaccaacaagctgaccaccttccgcttcaccggcgccctgcagggcagcttccagttcaacgacaagtacttcgactgggaagccggctacatctaccagaactcggaaaaccagcagagccagaccggcaactacaacgtgctggcggtcaatgccgccaccggcccgtcgttctacaacccggccaccggccgcgtcgagtgcggcacggcagcaggcctggtcgatggctccaacccgatctatggcccgggcgccggcggctgcctgccgtggaacccggccattccgtacggccgtaccggtgacggtggcctgaccggcaacccggatctgcagcagttcctgttcccgaccaccaagaacaccggtgaagtcaccaccaagacctactacgcgaacatcgccggcagcctgttcaccctgcccgccggcgacctgggcttcgcgctgggttacgagtaccgcgaggacaagggttcgtacaatccggacgccctgtcgcagaccggctactcgaccgacctggccgccggcccgaccggtggtggttacgacgtcaacgaagtctatctggagctgaatgttccgatcctggccgacctgccgggtgccaaggaactgagcttcaacgccgcgacgcgctactcgaagtacagcaccttcggcaacaccaccaacaacaagttcggcctgaagtggaagccgatcgaccagctgctggtgcgtgcgacctacgccgaaggcttccgtgcgccgaccatcgacaatctgtacggtggcagctcgcagaccttcgcgtacttcaccgatccgtgcgataccgacttcggttcgaccggccagccgggcgtcgctgcccgttgcgccgcggccatcggcccgaccgccagcaccttccgccagctgcgccagggctacgtgccggccagcggtccggatgagcagacgccggacccgttcaacgccgtctccaacccgaacctgactccggaaaagtccaagtccaagaccgttggcctggtgtggagcccgaccttcgcccagggcctgaacatgagcctggactggtggaacatcaagatcaccaacacgatcgtcaccgacagcccggatgaccagctgaacgactgctacgtgcttggcatcgccgagcgctgcaactcgttcacccgtgatccgaaccgtcacaacgtgatcaacctgacctacgcaccgcgtaacgccggttaccaggaaaccgaaggcttcgacttcgacgtggcgtaccgcttcgagaccgacagctggggtaccttcaacgccaacctgcagaacagctacgtcaccaagaacgtgctgaagaccaccaatgcgcagcaggtgccggtgtcgatcctcaacggcttcggcagcaacttccgcctgcgttcgaacctggtgctgggctgggagcgtggcgactggggcgtgacctggggcacccgttacttctccagcgtcaaggagcgttgctactacagcgacgagtgcagcctgccggacttcggttcgccggatccggtgcgcgaccagccgatgaacaagcgtggttcgaccatgttccacgacgtccaggtttcctggaacgcaccgtggaatgcgaccatcgccgtcggcgcacgtaacgtgttcgaccactacggcccgcagatgtactcggcaccgaactcgcagttctcctactacggtggctacgacatcggtcgcttcatgtacatgcagtacaagcagaagttctgatcggcgctctgatcagctgatgcagcaacggccccgcaaggggccgttgttctttgtggcgcatggaaacagctggccaggcacaacaaaaaaggccgcggtgtcgccgcagccttgcttcgcatcactcccgggtgctcatccgttcggaatcagcgtctcgatcagatgctcgacgtacgcttcgaaatcctcgcgcgcctgcttgggctgctgcagctgcaacgacaactgcaggaagccgacatacgcggcgtaggcaaggcgtgcccgatgacgcgcatcggtcgagctgaggccggcctggcggaacgaggcgaccagataatcgaggcggcgctgcgagacgcggtcgatcaccggccgcaccatcggatgatccagtgccttcagcagctcgctgtagatgatgtgcggctgcacttcatgcgccaccatctggaacagctggcgcaggcgcacgcgcggatccggtacgtcttccaggctgccgaacacctgttcctgttcgaacagttcccagcgttccagcgccgcctgcagcaatgcatcgcgcgaagggaaatgccagtagaaactgcccttggtaacgccgagtcgccgtgccagcggctccaccgcgacggcgccgacaccttgttcagcaatcagatcgagggccgcctgggcccagtcttcggcactcaggcggctgttgcggccggcgcgcggttcgccggcggaagcgtcaggttgattcatgggctgatttaaccatacgccggggttcgttgcagtacgcggttgcggtcgaaaccgtcgcagcctcccaggcgaggtccattcaggggacttccgcagcgcaccataccgtgcagtattgacttccccccgaaccgatccatactagcaagtatggttacgtccccacctcccgctgcgttccatgacctgcgcctggacgccgcccatggcgcccgcctggcagccaccgccagcgaccatggccggcgcggccgggtgctgttcgcgcatggcttcggccagacccgccacgcctggaatgccactgcccgcgcactgaatgccgccggtctgcagacgctggcctacgacgcccgcggccacggcgattcggactggaatgccgccaacctgccctatcacggcgaacagttcgccgatgacctgatcgtgctggccggcgagcagccgcgcccgccggtactggttgccgcatcgatgggcgggctgttcggcctgctggccgagtcgcgctggcccggcctgttctcggcgatggtgctggtcgacatcaccccgcgctgggataccgccggcgtcgagcgcatcctcgccttcatgaccgcccatcccgacggcttcgcttcgctggcccaggccgccgacgtgatctcggcgtacatgccgcaccgtccgcgcaaatccgagcagtcgctgcgtgcgctgctgcgcgaggacggccgcggccgctggcgctggcactgggatccgcgcctggtggccgaactggcccgcgacagcgaacagcaccaggacgcactggccgaggccgcgcgccaggtgaagtgcccgctgctgctggtcagcggcggacgcagcgacctggtcacgccgcagaccgtggccgagttcctggcgttggcgccgcatgcgcgccatgtgcagctgccgcaggccacccatatggtcgccggcgatgacaacgacgcctttaccgctactgtgttggactatctggacgtgttgcccgcagcggacgctgcggcttcgtccgccacaaacgagcacgtcaccggagcacgctcatgagcatcgttcttcccttcctcgccctgctgctggcaggcgcgttcgtcgcctaccaccgcatgcggctggttacctggacgctgatcagcgtggccctgctggccgcctgctggttcattccctacgtcaaccagaccgccacgatcgtcgcggccgccgtgttggccgtcatcgccgtgccgctgctgctgccgttcatccgcaagccgctgctgaccggcccgatgatgaaggtgttccgcaaggtgctgccgccgctgtcgcagaccgagcgcatcgcactggaaaccggttcggtcggtttcgagggcgaactgttcaccggtgatccggactggaacatcctgctcaactatcccaagccgcagctgaccgccgaggaacaggccttcctcgatggcccggtggaagagctgtgcgcgatggtcaacgactgggaaatcacccatgtccatgcggacctgccgccggaactgtgggccttcatcaagaagaacaagttcttcggcatgatcatcccgaaggaatatggcgggctgggcttctccgcactggcccaccacaaggtgatccagaagctggcgtcggtgtcttcggtggtcagctccaccgtcggcgtgcccaactcgctgggcccgggtgaactgctggtgcattacggcacccaggaacagaaggaccagtacctgccgcgcctggccgatggccgcgaagtgccctgcttcggcctgaccggtccgttcgccggctccgacgccacctcgatcccggactacggcatcgtctgcaagggcgagtggaacggcgagcaggtgctcggcgtcaagctcaccttcgacaagcgctacatcaccctggccccggtcgcttcgctgatcggcctggcgttccgcatgtacgacccggatggcctgatcggcgatacccgcgacatcggcatcaccctgggcctgctgccgcgcgacaccgccggcgttgaaatcggccgtcgccacttcccgctgaactcgacgttccagaacggcccgatccgcggcaaggacgtgttcattccgctgacccagctgatcggtggcgcggcgatggccggcaagggctggaacatgctcaacgagtgcctggccgtgggccgctcgatcaccctgccgtccaccgccagtggtggtgccaaggccggtgccgcggtgaccggcgcctatgcgcgcatccgcaagcagttcggcctgtcggtcggccgcttcgagggcgtggaagaagcgctggcccgcatcggcggcaaggcgtacaagatcagtgcgctgtcgcaggccaccgccgccgcggttgaccgtggcgacgtgccgtcggtgccgtcggcgatcgccaagtaccactgcaccaccatgagtcgcgaagtgatctcggacatgatggacgtgatcggcggcaagggcatcatcctggggccgcgcaacttcgctggccgcagctggcaggccgcgccgatcgcgatcaccgtggaaggcgccaacatcatgacccgcagcctgctgatcttcggccagggtgcgatcctgtgccacccgtgggtgctgaaggaaatgaaggccgcgcaggatccggatacccgcgccggcctgcaggacttcgaccgcagcctgttcggtcacatccgcttcggcatctccaatgccgtgcgttcgttctggttcggcctgaccggcgcgcgcttcggtgccgccccgggcgacgcctatacccgccgctacttccgcaagctggaccgctactcggccaacctggcgctgatggccgacatctcgatgatgaccctcggcggcaagctgaagttcaaggaatcgctgtccggccgcctgggcgatgtgctgagccacgtctacatgaccagcgccatgctcaagcgctaccacgacgaaggcgcaccgcaggccgaccagccgctgctggcctgggccttccatgacagcgtgcacaagatcgaagagtcgctgtcggccgcactgcgcaacttcccgatccgtccgatcggctggctgatgtgggcactgatcttcccgctgggccgtcgtgccgaggctccgggcgatcgcctgagccgtcgtgtcgccgccctgctgatggcgccgaatgaagcccgcgaccgtctggccagtggcgtgttcctgaccccgtgcgagaacaacccgggcggccgtatcaacagctacctgagcaaggcgatcatggccgagccggtggagcgcaagttcctgaaggcgctgaagagcaagggcatcgaggcgctggacttcaaggcgcagctggacgaagccgtggccgagggcgtgatcacccaggatgagcgcagcctgctggaagagctgcgcacgctgaccctggacaccatcagcgtggacgacttcgacacccacgaactgcgcgcggccagctactacgaccgccagcacaaggacccgcattcgcaggcagcctgatcgcccgcgacacgcgttgcttcgacggcgggcctcggcccgccgtcgctttatccgccgaccggaatacccaccatgtccacgcccctgctctcgctttaccaccggctgcagcgctggcccgccggcacctggctgttctcgcgcgcggtgtgcttcaaggcgccctacttcgccagcatcgcgccacgcatcacccgcctggaacacggccgctgcgaaggcacgctggccgaccgccgcagggtgcgcaaccacatcggcacggtgcacgcgatcgcgatgtgcaacctggccgaactgaccgccgggttgatggtcgatgcatcgctgccgaagggaatgcgctggatcccgaaggggatgcaggtgcagtacctggccaaggcacgtggcacgctgcaggcggtggcgttgccggcacagccgattgtcgtcgcggccgagggctatgcgctgccggtgacggtgagcgtgcgcgaccgtgcgggcacggaggtgttcagcgcggtgatcgacatgtggttgtcgccggcgaagtaggttcccgcgaacggcgcagcccctcgtgggtggacggttgatcgcggaaagccctggttaggctgggggcggtgggttcgcgggggacgccgtgaacccatccctggggacttggccgcggcatccatgccgcggacatccccgcgaacccaccgcccccagcctcggacgcatctctgcggcgtccacccacgcaagagaaaaaagaagggcagaagcaaaagcaaaagcggcccaccggccgctttttgctgttgctgttgctgttgctcttgaacttctttttcttctccgtgggctggccgcgccctgaaactgtcaggggtgtggcgggtgggccgttcaggggcgttggcgccatggatggcgccatcgagcttacatggacgtacttgcagcgtcccctgcacggcccacccgccacccccaacacatgacccgctccacgcgaccgacccacgaggggctgcgccgttggctggaaactacgccagcgcgcgaaacaccaacgccaggatcgccggcaccgcctggatcatgaaaatacggcggctcacgctgtacgcgccatagcaccccgccaccaccacgcaggccagcgagaacgtcaccagcaccggctgatcgatcaccagccccaccacgatgcctgccgccaggaagccgttgtacaggccctggttggccgccagcacgcgcgtggccccggccttctccggcgtgttgcggaaggtcttcaggcccagcgggcgggtccacaggaacatctccaggaccaggaaatagacgtgcagcagtgcgaccagcaaggtcagggcgagtgcgatccagtacatgtgcggttccttggacagggaaggagaatggggtcagcgccctatccccgcgggaaagggctctgaccccggcaaatcaacggtcgcgcggcagcttcttttcttcgcgcagcacgccgaacgcagccagggtcatgaagccggccaccagcacgccgccgatgaacaccacgtgcgaaccgaacagggtcagtgccttgtggatccaggtgaaccccaggtccgcgccgcggtacaccacggtgtcgatcgccgcgccggccttgtagcgccactgccggtccacgcgcgtgtagatggtctcgcgcgccggcttggccagtgcgaattcgctggcgcgtgtcatcacctgcaccaccgcgaccatcaacggcatcggcgaggctgccagcaccgagaagccgatcaggatcgcgaaaccgggaatcagcagcgccggcgcgatgccgtggcgcgacagcagccagcgggtcaggcccacctgcatcagcagcgccagcgcgttcaccgccaggtcgatgcgcgagaagaacgcggtactggccgccgggtcggtaaacgccgcgcgcacgatgctggcctgctggttgtacagcagcgtgccgacgcccacgccgaacaccaccatcaccgccaaccagcgcagcagcggctcgcgcacgatcagtttcaggccgtccagcacgctgccgcccatcggttgctcgccggacaccagttgctgctcgcgttcgcgcagcaccgcccaatgccgcagccgccagatgcacaacaggcacacgaccaggaatgctgccgagaccagcatcaggttggcgatgcccacgcgctgggccagcgcgctggtgatcaacgggccgaggaacgcgccaacggtgccggccgcaccgatgtagccgtagtaggcacgcgcctgtgcgttggagaacacgtcggccatgaagctccagaacaccgccaccgcgaacaggttgaagaccatcacccagaggaagaaggccatgccccgccctggcacgtgactgtcgaacagtgcgtagaaccccagcagggtgacgatgaagaagccgtacaccacgggaaggaagacacggcgcgggaagcggctgaccagccagccgtacaccggctgcagcaccagcatgatcacgaacacgcaggagaacaggaactgcaggacgaagtccttcaacgcgatgccatggctggcgaaccaggtgatcagcacgggtgggaacaccgtttccaggtccgccgaggcggccatggcctcacgcaccgggcgcagcacgtagtagccgctgagcaggcagaagaagtacaggaacgaccaccacagcgccggcgactcgcgcagcgccgccgccaggccctgcagcggccccttgcccgatgcagcgctcatgcagcgcccctcgcccacagacggcggttggacagcagcatggcaggctccggggcggtgaagcgcgtacgttagccaatgcactgcaacatcgccagcgtgacgcgccctcgcgcctgcggacggacgcgacgaccggcctggacgacacgttccgatacagactttcggggcgtcaaaattccaactttttcaacaagatgcgcattcatcttcgctttgtttgtgcacaggggaaaagcggcgctagaatcgccatcagcagtcgcgcacgggtccaaccgatgaaaaagaacagcctgcgtcgtccgatccgttcggcgaccaccggtttgctgggcatgttgatgcccgttgccttgtccaccaccgcgcagacaccgccggcgttgccgccgatgccgaccaacatcgaatccgcgacggctgccaccgtcgcccacacccagcctgcggcctaccgcaccggtctggtgccgcgcgtccaggcgccggcggctggcttcaacgtcgccaacatcgaatcgatggcgcagcagctgacctatggcgagcgcgtgccaggcatggcggtggcgatcgtgcagggcggccgcattctcagcgcgcgtggctatggcgtcaccgacgtcaacaacccgctgccggtcgatgcgcacaccgtgttccgcctggcctcgctgtccaaggccttcgccggcaccatggccggcctgctggtcaacgacggcacgctgcgctgggacagcaaggtcaccgactacgtgccgggcttccgcctcaattcgcccgaagccaccgaccgcctgaccgtggccgacgtgctcagccatcgcgtcggcctgccgtacaacgcctacgaccgcgacatcgaaggcaacgccgagtactacgcgctgacccagaagctggccaacaccagcctgaaatgcctgccgggcgactgctacgcctaccagaacgtggccttcagcctgatcggcgacgttgtctatgcggcctcgggcagcttctacgagcagtcggtcgagcgccgcatcttcaagccgctgggcatgaatgatgccagcctcggcctggccggcatccaggccagctcgcgctgggcgcgtccgcacgtgcgcagccgcaacggctgggtctcgctgacgcccaagcccacctattaccgcgtcgctccggcggctggcgtcaacgccagcgccagcgacatggcgcagtggctgctggcccacaccggccatcgccccgacgtgctgccggcaccgctgctggccaccctgcattcgagcctgatcaacacgccgggcgagatgcgttcgggctggcgccgtgagcgcctgcactcggcgggctacgcattgggttggcgtaccttcgactacgccggccacgacgtggtgttccatgcaggtgccgtgcagggctatcgcggcctggtcgcgctggtgccggaacgtgacctcggcatcgccatcctctggaatggcgaaagcggcctgcccagcggcctgctgccgaccgtgctcgactcggctcttggcctgccggcgcagcgctggctggatgtggacaccgacttcggcagcgacaacctgatggccgagggcgcaagcccggcgcagcaggacaagcgcaagggcaagggcgcctcgggcaaccgcgcggtggcttcgccgcgctgaccaggcgggctcgaccgtgtgtgcgaagggcggcccatcggtcgccctttttgttggccgttgcagcgtcgagcccatgctcggctctgcagttccgcagcgctagtgcgcgaagtagtgcatgccgccgtccactggaatcaccgcaccggtgatgtaacccgccagcggcgaggccaggaacgccaccagcggcgccacttcccccggttcaccaaagcgtccgatcgggatgttgcgggcaatgaacgcgcgtctgctttcctcggtggggtgcaggcggtccaggatctgcgcgctgttgatgcgccccggtgcaatcgcgttcaccgtgatgccctgccccgccacctccgacgacaggcccttgctccacaggtgcaatgccgccttcgccgcggtggccgcgttcaccgcgcgcggttccatcgaaccgctgaaattgatcacccgtccccatgcctgcgcctgcatgccgggcaacagcgcctgggtcagccgtcgtgcggcggagaagttcagggcgatcgcttcctcccagatatcgtcatcggcatcgaccgtggtcggccgggaaccgcctgcggcattgaccaggatgtcgacacgctgcaatgcctcacgggatgcgtccgcgatgtaccggaggtcgccggcaaccgtgacatcgccgaccacgatgaccggtgcagcgccgccttcggcttcgatccgcgccgccagcgcctgcagcggtgcccgctgccgcgacgtgatggcaatgcgcacgccctgggccgccagctgcctggcgacggcggcaccgatgccgctggccgcgcccgtcaccaacgcggtacggccagcaagattcaagtccatggtgttctcctgtcagcgtggccggcgaatccggtccgtgcacgacatgctgtttgatcacccctgattgataaactccacgcaggtttcagcattcaacacccggggtgtcagatgaacctgctggagagcatgcaggtctacgtgctgatcgtggacaagggcagcctcagtgcggcagccgcggcgatggatatctcggcaacgatggccggcaagcacctgcgcgcattggaagcccggctgggcatgcagctgttgagccgtaccacccggcgccagcacatgacaccgttcggcgaggactactacgcgcgctgcaaggagatcctgcgcctggtggaggaaaccgacgcgcaggcgcagcaccagcagctctcaccggcgggcacgctgcgcatcagcgcaccggtgatcttcggtacacacgcgctggtaccggcgctggccgagtacatggcccgtcatccggatgtccgggtcgaagccacgctgaccgatcgtgtggtcgacctggccgaagagggcttcgaggcggcactgcgcatcggcacgctggccgacagcagcgtgctggtggcccgagcactggccccctatcgcttgatgatgtgcgcatcgccggcgtatctggccaggcacggcacgccacgcagcgtgcacgcacttgccggccatcaatgcctgtcgttcgaaccgagtgcgcttgcccagtggctgcagcacgacgctggcgagctcgaccacgtgcccgacggccgactgcagatcaacaatggcgaagcgctgcgttcggcggcgctgcacggccttggcatcgtcctgcaatcgacgctgctgctggccgccgatgtcgaggcggggcgtctggtgcagctgttcccggaatacggtcaggccggtcggccgatgcacgtggtctatgcgcacgaccgttaccactccacccgcctgcgcagcttcctcgacttcctgatggagcgctttccagcggcgccgcacggctagcgccgaccgtcagcaaagcggtcgagcctggctcgactcgacgctacaagtggcccataaaaaaaccccctccccgctgggcagccagggaagggggtttcaggatgcggctatcgggaagtacttagatcagcggcgccggggttgccggcagagcgaccggagcggccttcttcttgcgggcggccggcttgcgcttggcaaccttcttcgctgccttcttcggggcagccttcttggtggccttcttcgcggtcttcttcactgccttcttggcggtcttcttgacggccttcttggcagtggccttcttcgcgaccttcttggccggcttgcgcgccgcggccttcttggcagtcttcttggtggccttcttggctaccttcttggtggccttcttggcagcggacttcttggctaccttcttcgccgccttcttcactgccttcttcgcagtggtcttcttggcgaccttcttcgcagccttcttcactgccttcttggcggttgccttcttcgcgaccttcttcactgccttcttggcagcggccttcttcgcgaccttcttcaccgctttcttggcggcgggcttcttcttcgcagctttcttggttgccatgggatggctcctcgtcagtgatagggagttgaaacgcccagttggatcaaacccgcggatgctgcgtgcggggaccgccggcgcgtcaggcgcgccgttacggatgcggcaatgcccgcctcgatcggcggagcgggcatcggaacgggagttgccttgcatttctccgggggaagcggggccatgtccaccgtcatcagggtcgcggtggtcttgaaggggctgcttcgcatcggacgattgattctgcgcactcggttgggcaggcaaggtctgctgaggcgaaacctaatcacggttttttttactgtcaacaacccccgcgaaaaattttcacatccgcgccttcccgggcgcggccggcgccaccactctgcacggcctgcaacgacggtggaagcggcgcgcacgcacgttgcctgcatcgatgccaatgcaggcgttgatcaaaaaacacttgaaataagcactccgcgtagacaggcgcaggcaaggcacaacggcgtacgcgcatcgtcggtggtcaccggcaccgccgccaacgccagcacaacggcgccgcaacggggggcgaaaagttttcacattcgaacgcttcggcgcggggctgaaacgcggatttgcgcaaaactgcgcacgcccatcggcaccgttcgcctgtcggctgatgccacgccgagggtgcacagcgaaccccgcgtcatgagtccgacgcggtcgccaaaacaaaaacggccacccgaaggtggccgttccagaatccggaaacgacgactcagtggtcgtcgttctccagggcttcggcgtacgcgtccgggtccagcagctcgttgacctcttcggcgttggtcagttcgatcacgaacatccagccttcgccgtaggcatcttcgttgatggtttccggcttgtcggacagggccgagttgacctcgacgaccttgccgctgatcgggctgtagacgtccgaggcggccttcaccgactcgacgacggcgatctgttcgccggccttggcgtcggcgccgacttccggcagttcgacgtagaccaggtcacccagcaggccctgggcgtggtcggaaataccgacggtgacgcggccattgccttcgacacgggcccactcatgggacttgaggaacttgaggtcgccggggatctcgctcatgggactgctccagagatatgcaggggtggaaaaaacggggctagtgtaaccaaccggccgccactgctgtcagtgacgaccggcacgttcggatcaggcgtcggcgagcacgccgggctgggcctggccttcgcgcacgaacgggaacttgaccacgcgcaccggcacctgccggccgcggatgtcgacggtgacctcgccgagttcaccggccggcacgcgggcgaaggcgatgcccttggccagggtcggcgagaaggtgccggacaggatctcgccctggccgccagcggtggtcaccgcctggccgtggcgcagcacgcccttctcgtccatcaccaggccgatcatctggcgcgcggtgccggcggccttctgcgcctccagcacgtcgcggccgatgaagtcgcggccttcgtccagcgacacggtccaggccagtgccgcttcatacgggctgatctcttcgtccatgtcctggccgtacaggttcatgccggcctccaggcgcagggtgtcgcgcgcaccgaggccggccggcttcacgcctgccgccagcaggcggttccagaaggcgaccacggcatcctgcggcagcaggatctcgaaaccgtcttcaccggtgtagccggtgcgggcgacaaacaactcgacgccgtcgtcggactgcgcctgcagggcggcgaagcggcccagcttggtcagtgctgcacggtcggcttcgcgggccaggccgatcacgatgtcgcgcgcctgcgggccctgtacggcgaggatggccaggtccgggcgctgctcgacggaaacaccgaacggtgccgcctgctcacgcagccaggccaggtccttttcgcgggtggaggcattgaccaccatgcggaagaaatcgtcgcccaggtagtagacgatcaggtcgtcgatgacgccgccgcgcggattcagcatgcacgagtacagggccttgccagtcaccttcagtttgtcgatcgaattggccagcaggcggcgcaggaacggcttgacctggtcaccgcgcagatcgaccacggtcatgtgactgacgtcgaacacgccggcttcgcgacgcaccaggtggtgttcgtccagctgcgagccgtagtggatgggcatgtcccaacccccgaaatcgaccatcttggcgccaagggcgcggtgggtatcgttgagcagcgtcttctgggtcatgaccggtccggcagcagaggaaacaggaattcccattatcccagatcggtcgcccgcaggcgtgccgcagcgcagcggttcgtggaagcggaagcgcggtccgccgcgccctttccctttcgggcgaggcaatggctgcgctccccgcaaccgcctgttacaggcgcacccgcccacgcaggatgtcgacgaacatcacccagtcacccatgaatgaatacagcggatgccggaaggtggccgggcgattcttctcgaagaagaagtggccgacccaggcgaatccataaccgcagaacagcgcggccagcaggagcgtcggctggccgcgcaacacggcagccgcagccagcagcagcaccccgcagctgccgatgaaatgcaggcgccgcgagaccgggtggcggtgctcgctgagatagaacggatagaactcgcggaagctggcgaagcgggacatgcgcgtgctccgggggccgtggtcactgccatcatgcgccttaccgggatgcagcgctgcgcgcttgcggggcatggcccggcggccgttgtagagccgagccatgctcggctgccttggcctttgtagcgccaagctcgctcgactgctccccggagaagcagccgagcatggctcggctctacaaaagggtgggcgcggtcgagcctggctcgacgctacaccgggggcgtgcgcggaccgaacatgatcaccgccatgccggccaggcacagggctgcaccgaacaggtcccagcggcttgggcggatgccgtcgaccagccacaaccagaacagcgcggtgccgatgtacacgccaccgtaggcggcatagacccgtccactggcagtcgggtgcagagtcagcagccaggcgaacagggccaggctggccgcggccggcagcagcaaccagacgctgcctcccttgcgcagccacaaccatggcaggtaacagccgacgatctcggccagcgcggtcagcaggaacaggccaagcgtcttcacgctttttctgctgccttggcgtgctgccacagcgcttcctgcgcatccaggtccagtgccgccaacgcctccccctgcgcctcggcctgcgcttccatcgcgcggaagcgccgctcgaacttgtggttggccccgcgcagtgcggcgcccagatcgatatcggcgtgccgggccaggttggcgcagacgaacagcaggtcgcccagttcttcctgcaggcgcgccttgttgcccgcgatatcgccgcgctcgaattcctctcgcagctcctgcagctcctcggccgccttgtccagcacaggcagcgggcccggccagtcgaaaccgaccctggccgcgcgcgactggagcttcacggcgcgctgccattccggcaggccacgcgagataccggccagtgcggaggtgtcctgctcgcccttggcggcacgctcggcgcgcttgatcgcgtcccagttgcgcatcaccccgtcggcatcgtcgacgctgacatcggcaaacacatgcgggtgacggcgctgcatcttgtcgctgatcgcacgtgcgacatcggcgaaggcaaatgccccctgctcctcggccatgcgtgcgtggaacaccacctgcagcagcaggtcgccgagctcgtcgcagagatcgtcgaggtcgccgcggtcgatcgcatcggccacctcgtaggcttcctcgatggtgtacggggcaatggtcgagaagtcctgctccaggtcccatgggcaacctccctgcgggtcgcgcaggcgcgccatgatgaccagcaggcgttccagttgatggcttgcctcgctgccggtggcaggggtgtcgtgcgcgctcatgcggcctccaggttcagtcggacaaccagtcgcgccacggcaggctggtatcaccaagggcaatgaaatcgccgttcaacagcgtttcgcggcggttgtaacggaacggcttgccggtcgcggccgacagcaccgcgccacccgccgcatgcagcacgcactggccggcggcggtatcccattcagaggtcgggccgagccgcggatagacatccaggccgccttcggcgatccggcagaatttcagcgacgatccctgcgcgatggtctcgatgcggcccatgcgcgccagcagcgcctcggtttccggcgaacggtgcgatcggctggcggcgacgcgcagcggagcagtggccggcgtgcgggtgcgcagcacggtgtcgtgcagaccctgccgccgataggccagttccccgcgcatggcatgccagacaatgccggtgaccggcgccagcaccacgccgaatgccggtgcgccctggtagatcaaggcaatgttgacgctgaactcaccgttgcgcttgacgaactcgcgggtgccgtcgagcgggtccaccagccagtaggcgccccagtggcggcgctgctcccagcccacctgcgccgattcctcggacaggatcggcaggtccggggtcagctggcgcaggcccagttcaatgacctggttggcggccaggtcagctgcggtgaccgggctgttgtcgtccttgatctgcacgtcgaagccatcggcatacacctgcatgatggcctgtccggcttcctgggcgatggcgatggcggtctcgcgcaggtccgtcgtcagcttgatcatcgcgttccctgcagccactggcgggcaatgaacagcgccgccagcgagcgtccctctgagaagtcctcgcgcagcatcagctggtccagttcggccagcttccacggcaccacttccagctcctccggctcgtcgccggccagtttttccgggtacaggtcgcgcgccaccaccagccacgactggtggctcatgtaggtcggggccagggtcatcgcgcgcagcacgtcgacccggcgcgcaccataaccggcctcttccttcagttcgcggtcggccgcctgctcgggcgtctcgccggcatcgatccggcccttcaccagccccagttcgtaacggtgcatgccagcggcgtattcacgtaccagcagcacggtctcgtcgtcgagcatcggcaccaccaccaccgcaccgtgcccacggctgaccaggcgctcgaagcggcggcgttcgccgttggagaactccaggtccaggtgctggcgctggaaggggccgttctcctcatcggtgattcgatggatgatcggcaagcgacggccggcacggtcatcgttcatgcggaatctccgcggcgaccggcggctgcgccggggccgatagaatgtgcaggcagcaacatgttcatgagcccgaaatgctagcagacccaaccccctccccgctggcccgccactggcggcagcgcgacctgcaggtgctgtggcacccgtgcacgcagatgcgtgagcatccggacaccctgccgctggtaccgattgcccgtggcgaaggcgcatggctgatcgaccacgacggcaaccgctatctggacgcggtcagcagctggtggaccaatctgttcggtcatgccgaaccgcgcatcggtggtgccatcgctgcccaggccgggcagctggaacaggtgatgctcgccggtttcggccacgagccggcgatcaccctggccgaacgcctgctggcactggcgccacgccaggccggccgcgaaccgctggccaaggtgttctacgccgacaacgggtccgccggcgtggaagtggcgctgaagatggccttccagtacttccagaaccgcggagagccccggcgcacgcgcttcatcgcgctcgagaacggctaccacggcgaaaccctgggcgcgctggcgctgggtgacattccgctgtaccgccgcgtctatgcgccgctgctggccgagggcctgttcgcgccgtcgcccgatgcctacctggccgaaccgggccagagcgcggccgatcgcgcacggcaggcggccgatggcctggccacgctgttcgaccagcacccgggcgaggtctgcgcggtgatcctggaaccgcgcctgcagtgtgccggcggcatgcgcatgcatgacccggtctacctgcagcgcgtgcgcgaactgtgcgatgcccatggcgcgttcatgatcgccgacgagatcgccaccggcttcggccgcaccggcaccctgttcgcctgcgagcaggccggggtgatgccggacctgatgtgcctgtccaagggcctgaccggcggcttcctgccactggccgccgtactggcgacgcaggcgctgtatgacgccttcctcgacgactcgcgcgagcgcgccttcctgcattcgcacagttacaccggcaacccgctggcctgcgccgcggcgctggcgacgctggacgtcttccgcgacgacgatgtgatcgcgcgcaaccggggcatcgcctcggtgatgggcacgctggcggcaccgtttgccgaccacccgcacgtggccgacgtgcgccaggccggcatggtggtggcgttcgagctgtcgcgcgacggcaacaagcgcacgccgttcgacccgggcctgcggctgggcctgcaggcctacaaggccgccctcaagcgcggtgtggtgctgcgcccgctgggcgacgtgctgtactggatgccaccctactgcgtggacgacgaacaactggagctgctggcgcacaccacgctggcggccatcgacgaggcgattgcatgcgcgtgacccgctgccccatcgacctggcgctgcacagcggccagaccgtgaccctgccggaagagaccgccaaccacctggtgcgggtgatgcgcctgcgcgaaggcgatacctgcgtgctgttcaacggcgatggccacgactacagcgcgacgctgaccgtggccggcaagcgcgaggtgcaggtccgcatcgacgccgtgcaggccatcgacaatgaatccccgctggcgatcaccctgctgcagggcatcgcccgtggcgagaagatggacctgatcctgcagaaggccaccgagctgggcgtggtcgcgatcattccggtcaacgccgagcgcaccgaggtgaagctggacgcggcacgggcggagaagcgcgtggcgcactggaacaacgtggtgacctcggcctgcggccagtccgggcgcgcgcgcattccgccggtaggatcgccgctgtcgctggcgcaggctgcggcggcgctgccagccgattcgctgcgcttgaccctggatccgcacggagcacatcgcctgtcgacgctggaagccgctcccgctggcggcatcgtgattgcaatcggcccggaaggcggctggtcgccacgcgaccgcgatcaactggccgcagcaggattccaggggctgcaactggggccgcggatcctgcgcacggaaacggccggactggccgcgatcgcggcgttgcaggcgcggttgggcgatctggggtgaggctgattcgtggtagtgccggccgctggccggcatccacgggatcatggggctgccggccagcggccggcactaccgggaacccgaccggcggattgccgatcaggccgccagcggatgtcgacgctggaagccgctcccgctggcggcatcgtgattgcaatcggcagggttccaggggctgcaactggggccgcggatcctgcgcacggaaacggccggactggccgcgatcgcggcgttgcaggcgcagttgggcgatctggggtaaggctgattcgtggtagtgccggccgctggccggcatccacgggatcatgaggttgccggccagcggccggcactaccagctacccgaccggcggattgccgatcaggccgccagcggatgtcgacgctggtagccgctcccgctgccggcatcgtgattgcaatcggcgggattccaggggctgcaactggggccgcggatcctgcgcacggaaacggccggaccggccgcgatcgcggcgttgcaggcgcggttgggcgatctggggtaaggcttcgtggtagtgccggccgctggccggcatccacgggatcatggggttgccggccagcggccggcactaccagctacccgaccggcggattgccgatcaggccgccagcgaatccagcgccgcttccagtgcatccaggttcggcagcagcgcgctctgctcacccagcagcacgcgcatgtgcacgatctgcggcagggtttcttcggaggcgtcggccagcaggccgtcgcgcggcaccgagatcagctgcgggaagttctgcgtcagcagcgcgtagtacgggcgctgcgcgttgccgctgagggacttcagtaccaccaccttgttgtggccggccaccgtctcttcgcccagcccggaaaggcgtgcgaacgacaccagcggcacctgccagccgtgccagccgatctcgccaaccagccagcgcggcgcatcggagaccggctgcaccggtacgcgcgacatcatttcggccacggtggcattgggcagcagtacgcgctcgttgccggcctggatcaggacgccgcggatttcgtcgttgctggcgtagctcatggtgcctctccgttgtcgtcctgctcaccccagcgcgcggcaattgcctgcgccagctcctgcggttcaccggccaccatgccggcagcaaccacggcggtggccgcagccgggtcgtagcagccctcgcctacctgcccggccacccacgcaccggcggccgccaggtccagcgccgggccgacatgggccaggtcggcaccgctgagcagcaccagcgcagtgtgtgcggccggcaatgcagcgagcgaaataccggtggcatcgctctggaaatgcaggccatcgctggccgcgcgcacgccgatatcatcagccagcacgtggacctcgcccggcgcggcgcgctggccggcctcggccagctgcaccggcaacggcgaaacacgcgacatctgcttgaccaggttgccgtagcggcccccgtccaggcgcatgtgcaccaggaccggcacgctcaacgacgcgggcagtgcgccgagcaggcgacgcaacgcatccgggccaccgatgccggccagcaccagcagtgatgcggcgcgcgcaccggccggggcggcggcatccagatcgaccagggtcaaatgatcggtatcgaaggagggctgcggcgcggcggccggcgccgccacttctgcctgtgccggcgcttcgatcgattcctcgaccagcgaccaggcggtgtgatcgaaggagatcggcggtgccgcaggcgccgccggttcggccggcgcttgcggcggcgaaggcggatcccgtggttcgggcacgtccggctgcagtgccgccagggcctgctccagcgcgatcggttcgtgcaggtgtgccggcggcgagtacagaccgtcggccggaacgtcatcggcccagctcagcgcctgcgccagatgcggctgcagggcttcttcctgcggtgccggcgcgggcgccggatggccgggctccagctgcaggctgggctcttcctcggcacccggcggcaacacctgctgatggccgtgcagcttggcggccagatggcgcccccaacgctgcgcctcccagccgtcgcggcgcgcggccagctcggcctcatcgaacaccagggtcagccccggtgccgagagcacggcgtccagccgttccagtgcgtcctcgatggccgcttccagcgcgatcaccacgaactgcggatccgcagcctgcaggacctgtggctccaggccgttcgggtcatcttccaggaccagctgcacatctgcatgcgacagcgcctcgcgcaggcgttcgcgcgccgcaccggggcgggccagcagggcgacggccggggccggatgggtttcactcacggacacgggcgatccccagcaggtcgtacacgttacgcatcaggtccagttcctggtacggcttgcccagataacgctggacaccgatctcgaaggcgcgctggcggtgcttgtcgccgctgcgcgaggtgatcatcacgatcggcacatccttgtagcgcgggtcggcgcgcatcgccgtggccagctcgtagccgtccatgcgcggcatctcgatatccagcagcatcaggtccggcacgcgctcttccagccgctccagtgcttccacgccatcgcgggcgacgctgacttcgaagttgtgccgttcgaggatgcgtccggtcactttgcgcatggtcagcgagtcatcgaccaccatcaccagcggcacctggcgttcgtcgcgcggtgcattggccagcaccggtgcggtcggattggcgaggaaacggcgcaccagcggcgcgacgtccaggatcaccaccacgcggccatcgccggtgatggtggcaccgtagatgcccggtaccgatgcgatctgcaggccgaccggcttgaccacgatttcgcggttgcccagcacctggtcgatcgccacggcagcgcgcaggtcaccggcacgcaccagcagcagcggcacctgctcctggccatcggcgcgtgccggggcctgcccgaccaggctgccgaggtcatacagcggatagtcttcgccgctgtagcggtagctgctgtcggcggcctcgaagcgttcgcgtgacaggcggccgataccactgaccgaggccaccggcacggcgaaggtggtttcaccgatctgcacgaacaccgcctgggtgacggccagcgtctgcggcaggcgcaaggtgaagcgcacgccctggccacgcaccgactggatgtcgaccgagccgccgagctggcgcacttcgttgcgcaccacgtccatgcccacgccacgacccgccagctggctgacctggtcggcggtggagaaaccggaggcgaagatcaggttgtccagttcctgctcgctgggctgcgcatcggcggccaacaggccacgatcgatggcgcggcggcggatcgcttcgcggtccaggccagcaccgtcatcggccacttccagcacgatttccgagccttcacggtgcaggcggatggcgacttcgccctcctccggcttgccggcggcgcgacgctgttccggcgcctccaggccgtgggccacggagttgcgcagcatgtgttcgagcggcgcgaccatgcgatcgaggacattgcggtccagttcgccgtgggtgccctccagggtcaggtgcacctgcttgccggtatccattccggactggcggaccacgcggcgcaggcgcggcaccaggccatcgaacggcaccatgcgcgcgcgcatcaggccatcctgcagctcggagctgacgcgcgactgctgttgcagcaacgaatcgtactggcgtgacagatcgtcgagcacgccctgcaggcccccgagatcggccgccgactcgttcagtgcacggctgagctgctgcagcgtggagaagcggtccagttccagcggatcgaacttctgatcggcctggtcctgctcacgctggtagcgggcgacgatctgcgcctcggtttccaggtcgagtcggcgcagctggtcgcgcagtcgcgcattggtgcgctccagctcgcccatcgcgccgcggaaggcacccagctgctgttccaggcgcgagcggtagatcgccacttcaccggcatggttgaccaggcggtcgagcagatccgcgcgcacgcgcacctgttcctgctgcgggcgcgccagcggatcttcatcgatcacgccttcggccggcagcggtgccgacaacggcgcatcgagcagtgccggcgcagggccggcgaccgctgccgacgcggtttctgcaacgctcgccacgtccgctgcgcctgcggcagccgctgctgctgcggcaatatcggtggtggtacgcacttcgaacgcatcgaccagatcctgcgccggttccaccacgcggtggttaccggtgcgggtcagcaactggtgcaggcgatcgaatccgcgctccagcaactgcacatcgcggcgttcgatctcggtgcgaccggcggcgaccgcctccagcaacgattcgatgctgtggccgagatcaccgatggcgttgatgccggccatgcgtgcgccacccttcagggtgtgcaggtcacgctgcaggccggccagcacctcgcggtcctgcggtgcatcacgcagctcgctgatcaggccatcgcagtggtcgagcaggtccttgccttcctcgacgaagatgtcgaccagctcgcgatcgtagacgctgaagtcgagcgtatcggtgctgtcttccggcaccggcatggcaaggatgtcaggtgtcacggtttcaggcacgtcggcttcgggcgcgctggctgccacggcatccgacaccgcaaccgcgtcgacgccgccagcttcggcgtggacctccgcctggcccggcgcgtcttccagttcgaagaagcgtaccggttcggcggtggcctgcgctgcggcctccgcgatctcctcattcaccgtcgccggggacggctgatcggcgctctctccttcaccgatcgccgcctccccgccgacgtccgcatcctcggcaaaggcttccgcctcgcccggcgcgagttcgctggcctgcaggccgagcacgggccattgcccgtcgtcggccaggggctgctcttcgtcgatcacgtgcaggccggcctcgagcgcggcttccagcgagaccggttctgcaaaccccggcgcagccatttcatcctgcaggctcgacagctcgctgtcgagtggcagtgcagcaggcatttcgaacgccgtggcatcagcgacgtgcgcgcgatcggccgagggcgcattcaggtcagatgcgacggcttcgacagcggccggagtctcttcggcgtcgcggtcgtcaaccggcagcgcactggcatccaggtacggcgacagatcatccacgacggtcaaaccggcatcgtcggacaaccgcagcacgccttcggcctccgcctcgacaccggctacggcaacggctggaacgtcgtcggccacctggatcgattcgaccaccggcagcgacgcatcctcctcacccggtacggacggccatccggcatcgaagtagcgcgaaagatcatcgctggccgtcagctcaccgacctccagcccggcctcgatcgccacgtcggcgaccggggcttcgacagtatcggcacgtgcttccgcgtcctgctccggtgcggcaaacgaatgcggcaccgcatcggattcaggcgcgacggctgtcgatgcatccgcgtccagttccaccggcggttcgtcatccagcgccagatcgtcttcttcgtcttccaggcccaccatcggccagcgcgcttccggcaacgcgccagccagcgcctgcaggcgctgcgcgagtacctgttgcggcgcgatgcgcggctgttcggcctgcaacgcttccatggtggcggtgatcgcctgcgcagtcgcatccagggcggctacgccttcatcacccgggaccacctcggcggccagtgcgcgcttgatgtaggactccgcgccgccggtcaccgccgtgatctcgggcacttcggtcatcgcgaaggcgccgttcatggtgtgcaccgcgcgcagcagtgcatcgctgaccggttgcggcgcctgctgcgccgaacgcagccagtcctgcagggtggcctggtggacttccacctcggcctcgagaatctcgcgcagcacgctgtcgatgttggccggcgtaccggccacttcggcctccacgtcggtatcggccggcgccgaggcggcagcctccacatcgagaatgcggctgatctcgtcttcgccgtcagcttcagcaaccggtacaaccggcgcagccgcacccggcagcggtacgtagtaggtttcctcgcctgcgccgacacgatcggcaatggcctgcatggcctgcaggtcgacgctgatgcgctggccgtggcgcagcgctgcgttcagctgtggcagcgccgcatgtgcgttgtcgaccatcgccagcaccgccggcgaggcggcgcggctgccatccagcacgcggttgagcatgccttcgatcttccacgcgaactcgcccagcgtacgtgcgccaaccaggcggccactgcccttgagggtatggaagatgcggcggatcgggcgcagccggtccatgttgtccggctgcatgcgccacgccggcagcagcgtgcccagattggcgagctcgtcgtcgaactcttccaggaacacctcgcggatgtcctcgtcgatgttctcggcgtcgtcgtcgaagccggcgtcgaagcccgtagtcgcgtcggcattggcgtcggcgccggtcgcaacgaccgcctccggtgccgtcgcggtgggcatcgcctgcggattgaagccggcagcggctgcgctcagctcggcgaagaactgggcatcggcttcgctgaaatcgatcggcgcgatggtgtcgatatcgatcaccgacacggccggcgtcgacgtttccgctgccggggcgggcgcttcgatcgacggcggcgtgatcgacgatgccggcaggtcatccggagcctcgtccaccctgacctccgccgcaggcgatgcatcggccagcggcggcgccacggcatcgacgatctccagcgacggatgcaacccggcgtcatcgtccagcgacaacgtttccatcgcatgcagcgacagcacgtcgtcagcgttgtccaatgcatcggcgtcgaagcggaacaccacgtcgtcggcctcggcaaccgcgccctgttcggccgctaccggatcgaacaccggcgcagcatcgaatccggtcacgggcgaaaccatgctgtccgtcgtctcgtcgatcgcaggcgctgcgctttcctcgagcacctgcggcgcctcggacagcgaccactgcggtgcatcggcgtgatcgctgtcggccagttcgaagctgacgggatcgaaactggcgaacgtcggcgcgcgttcgtcgccggcgggcgcggccgcctcggcttcggggtagaacggcgccagctcccactgtgggacatcaggcgcaggtgcgctggacgcggcgaagaccagcgatgcctcggcatcatcctgtgttggcagcggcgaggcgccagcatccaacgggctggcggccacgacgcccgcggtgcccagcgcgccgaacatcaggctgttgtcgggcaccctcggtgccggtgtggccggcggcggatcgaaggtgaagtccggcagcgataccggcacgtcgccggccgcgggcgcagcaggctgcaccggtacctcgatgcgctcgggctgcagcggctcgacctgcaccggcagcggctcacgttcgatcgccagcgctgccggcgcttccggtgcggcggcgttgcgttcgggcagcggccagtagcgcagtgcctcgaggctgctgcgggtgatttcgaggatgtcttcgcggcccgggcgacgatcgcgcagggcttccaggtagtactccaggctggccatggcatcggccagggtgtccagctggcggccgctgggcacgcgctggcggccgatcagctcggcctcgatgtactgctgcacgccacgcaggtaatcggcggcggtacccaggtcgagcatgcgcagcgcgccggacacatcgcccagcaggcgcggtacatcctgcagctcggcatggttccagctggtttcgatgaaggcgacgaaatgctcgcgggcggcagcgaagttggcgatggcttcatgggccagcacttccaccgtgcgccggttctccaccgcgctcggatcgtcctcgccactgccgccggcgcccagatgggcaacctggtcgtccagcgaggcatcgacgtacagcagcgcaccggcgatatccagcagcaggttctcgtcgatctgctggcgcccctcgaccacgccacgcagcgcgtcgcgctgctgcacgaccacgccgcgggccacgcccaggcccatcatgcccagcgtgtcggccacggcgcccagttcgttggcctgggtctgcagctgttccggtgcaccgccggtgcgcaggtgcaggtcaagcgcatccttgatgcgcagcaattcttccttcactgcgctgccgacggtatcgagcagctcgcggttgcgcccgctcaggctgccccgggcatggtccagctcggcctcggtggcggtgatgctgtccggcgcaaaggccagcagcacgctgtcgttgacgccttcttcgccacgcgacgcgcggatctcgttgagcagcggcatcagcacgatcggaatgtcgcgatggccgttctgcaggcgctccagatagtccggcagcagcacgctgccacgcatcagggtcgcacaggcttcatcccggtcggccacctggccggcgccgatggcattggccagctgctcgagctcttcggccaccatcgccggggcatacagttcaaccatgcgcagggtgccctgcacctggtgcaggtagccggcgcagatgcgcatgcggctggcatcactcgggtcttccgcgtagtactcgacctcgttgcgcacctggcgcagggtctcgtccagctcgggcttgacccagcccagcgctgcgtggctcatcgcatcgcgcagactgctcatggacgcgctccgttcgccgccgcgcggtggccgcgcggattctggcgtggggaatggaaatgcttcatcgactggttccttgctcgccgccctgcccgcgtcacgccggcagcttgaagtcggcgaccgaacggcgcaggtccgccgccagctgcgcgaggtggccgatcgactctgcggtctgcccggcaccctgcgaggtctggccggtgatctgccggatcacgcccatggtgcgggtgatgtccgaggccgcggccgactgctgctgggcggcgatggagatgttcttgatgagggtattgagggcgttggacacgcgctcgatctcggtcagcgcggtaccggcgtcctcggccaggcgcgcaccggacaccacttcggccgtggtctgctccatcgaggtgaccgcttcgttggtatcggcctgaatggcctggaccaggttttcgatgcgtcgggtcgcacccgaggtacgttctgccaggcgctgcacttcgtcggccacgaccgcgaaaccgcggcccgcttcacccgccgacgccgcctgcaccgccgcgttcagcgccaggatgttggtctgctcggaaatgtcattgatcagttccacgatcgagccgatttcctgcgacgactcgcccaggcgcttgatgcgcttggaggtttcctggatctggtcgcggatctggtccatgccctggatggtctcgcgcaccacgccggcgccttcggcggcgatcaccaccgagcgctgtgccacgtcggccgactcggccgagttgcgcgacacctgctcgatgctcgctgcgatttcaccgatgcggtccgaggcggaggtgatctggttggcctggtggcccgccgcctctgccagctgcatcgcggtggcctgggtttcctgggtggacatcgcgaccttggccgaggtgtcgttgatggtggtcaccaggtggcgcagctcgtccaccgcatagttgatcgcgtcggcgatcgcgccggtcatgtcctcggtcaccgaggccttcaccgtcaggtcaccctcaccgagcgaggagatttcgtccagcagccgcatgatcgcctgctggttgcggctgttgaattccacctgggtctggtaacgcagttcctgctcgcgcgagcggctgcgcacgttggtggagacgaagccgatgatcgcgatcagcgacagcgcgccggacaccacgccgatccagaagttcgggaacaggcgggtgtcggacaccgagccgaacgaggagaacgcatcgaacagcttgcggctgtcgtccagcatgtgtgccgagccctggcccagcgcggtggcggcggactgcgccgcgaacagctggcgcgagctggccaggatcgcatcggcgtcctgcttcatcgcttcccacttctgctgcgactgctccagtgcggccacggcggcagcaccgcgcacggcggtgatgcccagttcctcgttgccgttgcgcaggccgtcgagcacctgcgagaacacggtgatgtcacgcgccagcgcatccccggaggtcgccgcggcgctgccaccggcacgcatttcggtcacacgacgggccatcgagccggccaccacgacctgctgcagtgcgctgtacacctgcgacgagggggcgccggaggcggacatcgcgcgcacgagctcgttcagctgggcctgcaggcccggtaccgcgccggtgaagttgttggcattgccggccagcgccagcaccgccggctcgctggccaccagctgcccggcctgcttgcccagcggcgcccaggtttcgcccagggtggcgatggcgccggacacgcccggctccttgccatagcggccctgcagcgtcgacacgttctgttcgatcgcgttgcgggtggccttgaaggcggtgaaggcctgggcgttgccgccgaccgcgtcacgtccctggttggccagctgctgcgacagcacctgcaggtcggcggccttggagccggcgtcggcaaggcggctgccctgccaggtggcgacgccggtgttgacgccgaacaggatcatcgatgccagcagcaggaacagccagaggttgctgccgcccagccgcagcttgccggtcttggtggcgtccgaagcagtactcatcgttcaacctcgatcttcaatgcagggggcgatgcccggcctcaggccgcggcttgccggaattcaggggtgcgcgacagcagcgagagcgagaacacgccccagtcatggccgtcggcatggaaggcacggtcaacgaaatggccgtagcggccttcggccaacgtgcccgcgtcgatctgctggtccagctcgaagctgcgctggccgaacagttcatcgatggtcagtgcgacgtcgccgccagcctggcgcatgatcagcacgcgctggccttcctgctgcacggtgcgcgtgccttccaggaagtacttcaggtcgaccaccgggaacaggttgccacgcaggttgcccacgcccagcagccagggctgcgcgcagggcaccggggtcaccggcggcatcggcacgatttccaccacttcgcggaaatcggacaccagccggcgctggccgacgcggtaaccgacgccacgccacaggtcctgggcgaactgccgcccgggcagctgcactgcatgggccaggctgcgtcgttcgtaggcttcaaggatgtcgaagggcgagcgcatcaggccaccagttcgttgatccgcgcgatcagttcatcctcgcgcggcggcttgacgatgtaatcggctgcgccctggcgcaggccccaggccttgtcggtttccatcgccttggtgctgacgatgatcaccgggatgtgcttgatcgccgcatcgcgggccatcgcccgggtggcctggaacccgctcatgccgggcaggaccacgtccatcagcaccagctgcggcgcctggtcgcggaccagctgcaggccatcctcggcgttgtccgcttccagcacctcgtggccggcacggcgcagccactgggtgaacaccgcgcggtcggtcggtgaatcctcgatcaggacgatacgagccattgtgcctttcccccctggtcaggcgttgacgtatgtgcggatggcacccagcagttcttcgcgcgtgaaaggcttggtcaggtattgctccgagccgacgatgcgcccccgcgccttgtcgaacagaccatccttggacgacagcatgatcaccggggtcgccttgaacagctggttgcccttgatcagcgcacaggtctggtagccatccaggcgcggcatcatgatgtcgacgaagatgatctgcggctgctggtctgcgatcttggcaagcgcttcgaagccgtcggtggcggtgaccacctcgcagccttcgcgcttgagcagcgtttccgcagtcctgcggatggtcttcgaatcatcgatgaccatcacccggagtcctgcgagttccccgcccgcagtcgtgttttcagtcattgcctatccccaagcgcacggcccaatctctggcgggagccgctgcgaaagcgtatctatatcgcacttcccgcgcccgcttcaaggccggcctgccgcgcagggggtagcaccgggctgaacgtgaccgggttcgcaatgactgcgctgccggcaggcggacgctgcgttgcactacggcggggaggcacacggccggcgttgccgctaccatcaacgccttgcctgacaggtgcgcccatgccgttgaacgtcatcgtggtgatggaccccatcgcccacatcaagatcgccaaggacaccaccttcgccatgttgctggaagcccagcgccgtggccatgccctgcactacgtgcggcccggcgggctggccctggaaggtggcgtggcggtggcccagaccgcaccgctgcaggtgcgcgacgacccggccggctggtatgagctgggcgcgttcagccgtaccgagttcggtcgcggccagatcgtgctgatgcgcaaggacccgcccgtcgacgccgagtacatctacgacacgcaggtgctggacgtggctgccgctgccggcgcctgcgtggtcaacaacccgcagggcctgcgcgactacaacgagaagctggccgccctgctgttcccgcagtgctgcccgccgaccctggtcagccgcgatgccaaggcattgaaggccttcgcgctggagcacggccaggccgtgctgaagccgctggatgggatgggcggccgctcgatcttccgcagcggccagggcgatccgaacctgaacgtgatcctggaaaccctgaccgacggcggccgcaagctggcgctggcccagaagttcattcccgacatcacggccggcgacaagcgcatcctgctggtcgacggcgaaccggtcgactactgcctggcgcgcattccccagggtgacgagttccgcggcaacctggcggctggcggccgtggcgaagggcgcccgctgagcgagcgtgaccgctggatcgccggccaggttggcccggagatgaagcgccgtggcatgcgcttcgtcggcctggacgtgatcggcgattacctgaccgaggtcaacgtgaccagcccgacctgcgtgcgcgagctcgacgcgcagtacggcctgaacatcgccggcaccctgttcgacgcgctcgaggccggcctgcgctgatggcggccgcacctgccgtcctgcccccgccggcgcgcgaagcgcaacggctgggcgcgaccatcgcgctgtcgatcgtggtccacgccctgctgatcctgggcgtgggttttgcggtgaaaggcgacgcaccactggtgccgacgctggaggtgatcttcagccagacccgcaccgcactgaccccgaagcaggccgatttccttgccgccgccagccaggaaggtggcggcgagcacgaccgtgcgcagcgcccgcgcgacaaccaggccggcatcgttccgcaggcccaggcggggctgagcccggtgccgcaacagcagcagtcggccgcgccggcgcccccgccgcaggcgcgggtggtcagcagccgcaacggcgaagaggcagtggcccaggcgcaggcgcgccccacaccggagcagccggaaccggatgcaccgctgacggcacgcgagcagcgtgatgccgagatggcgcggctggcggccgaggtgcatctgcgctcggcgcagtacgccaagcgcccgaaccgcaagttcgtgtcggccagcacgcgcgaatatgcctacgccaattacctgcgcgcctgggtcgaccgcgccgagcgcgtcggcaacctgaattacccggacgaggcccggcagcgccggctcggcggccaggtggtgatcagcgtgggcgtgcgccgcgatggcagcgtggaaagcagccggatcctgcgttcaagcgggacgccgttgctggatgaggcggcgctgcgggtggtgcagcttgcgcagccattcccgccgctgccgaagaccgaggacgagatcgacatcctgcaggtcacccgcacctgggtgttcctgccgggtggcaccctgcacgacgaccggtaggggtttgttgcccgggcctgcggcccgggacccgctggaaggctggagcaacggcaacagcaacagcggcggttgggatattgggtttggcggggcggtatgggcttgcaggacacgccgtaaacccatccctgggggctcgatggcgccatccatggcgccaacggtcctgcaagcccataccgccccgcctctgacagaccccgacgcatcattgctgttggtaggtgtcgaccttggtcgacacacatccacgctacgcgtggatgcgagcgaagcgatccgcttttgactttgacttttctttttttgatcttccgtggcggacgcacacggaaactgtcagaggtcgggcggggtgggttcgcgggggtgtccgcggcatggatgccgcggccaagcccccatgggtgagggcgctttgcttgcgaagcactgcttcgcaagcgcccgaacgcacagccgccagcggctggaccggaccgcggagcggggttcacggcgtcccccgcgaacccaccccgcccggccaagcgcggctttgggtttatgcgatcaaccaaccccgccacgaggggctcagccgttggccttcgccttcgcctcacgcgcggcctgctgctcgaccagggtcagtgccacgttgtcgcgcaggtaggccggctcgaccttctccggcgcaatggcttcgccgcgcgcgaacgccggcaccgccagtgcgagcacgtccgacgcacgcggcaatgccgtggcgtcgaatccgcgcaaacctgtaccgagctgcgcgaccagcgcaccctcggctgcggcgaacccggtaccgacaccgtaggccgacagcccttccggcagcgccaccgctgccggcgcgcagacgcgctcggcatcgcgcgcgaccggcaggccgtccacgcgctcgaagcgggcgacgtagagttcgcccatccgcgcatcgatcgccgacaggatctgcgtttcttccgccggtgcgcgcagcgccaacacctgcagcgtcgagaccggcagcagcgggcggtccagtgccagtgcgatgccctgggcaatggcaatcgccaggcgcacgcccgtgaacgcacccggaccgcgactgagggcgatgccatcaagctggcgacggctgatgccggcgtcggccagcagcgcctcggcccacggcaggctcaactcggcgtgccggcgcggggcgagctcgaagcgttccagcacctgcccatcgacatgcagggcaacggaacaggcttcggtggcggtttcaaaggcaagcagtttcattggatcaggtcagaacaaggggaacgtggcaccgggagcaggctccgggcccgccgcaacggcggccggggcagccgcatcatcggccacgggcagccattgtggcctaaagaaggcctgcacatcggccaggctgcgggtgcgccggaacggcggcagcgactcaagaaagacccggccatagccacggttgagcaggcgcggatcgcacaggaccagcacgccccggtcgctttcgctgcggatcaggcggccaacgccctgcttcagggcgatcaccgcctgcggcagctgctcgtcgcggaacgggttgcccccctggctgcggatcgcctccagccgcgcctcgtataccgggtcatccggtgccgcgaacggcagcttgtcgatcatcaccacgctcagcgcttcgccgaccacgtccacgccctcgcggaaactggccgagcccagcagcacgccattgcccgattcgcggaaacgctgcagcagcgccgcgcgtggcgcctcgccctgcacgaacaacggccacggcccgtcgcgcagtgcctcggcggcctcgcgcaatgcacggtgcgaggcgaacaacaggaacgccctgccctgcgaggcctgcaacaccggccgcaaggtctggatcagcgcggtgccaaacccgcgcgccgccggatcgggcaggccttcgggcaggtagcacaacgcctgctcgggccagttgaacgggctcggctggaccagcgtgtgcggatcgtccaggcccaggcgcgtggcgatgtggtcgaagccaccgcccacggtcagcgtggccgaggtgaagatccatgccgcgcggctgcgctcgcgatgctcgcgcagcgggccggacacatccatcggcgtgcgctggcagcggaaaccacgcggggtgagctcataccagagcacatcggcggcacggggggtctccgccggatcggtatcgaaatcgagggtgggctcatcatcgcccagccagcgctgcagccgcgacaccgcctcgcgtgcccgcgcatgacaggcatccagacccgccgccgcctcgcgcagcggttgcagtgcctgctccagcgtcaccaggccggccatcaccgtatcgaatccatcgcgcacctgtggcatcgccagcgcacgccactgcgtaccccgtggcggcagcccctccatcgccgagcgcagcgccagcaacgcctgctgcaactggtcgaccggttcctgcagggccgactgcgcgccgcctacgccgcgcgcctcggccaggcagtcgcggccgagttcctgccacgggcgcatgccgaagccttcgccgaaaaactgcgcggccaactcgggcagctgatgcgcctcgtcgatgacaaaggcctgcgcccccggcagcaactcaccgaagccgtcctgtttcagtgccaggtcggccagcagcaggtggtggttgaccaccaccacgtcggcagcctgcgcacgttggcgcgcgcgcaccacgaagcagtcgtcccagaacgggcaatcggtacccaggcagttgtcgaccgtggaagtgaccatcggcagaagcggcgagtcatcggccaagccttccagttcggcgatgtcaccgaactccgaacggccggaccaggccaggatgcgctggaactgcgcagcctgctccgggctggaaaaacgcggttcgccccgcgcctgctgcaggcggtagcggcacaggtaattcgcgcgccccttcagcagcgcgctgcgcaggccaacgcccagtgcctggcgcacgcgcggcagatcgcggtggtagagctggtcctgcaacgcgcgggtaccggtggagatgatggtgcgcagcccggacagcagcaccggcaccagataggcgaaggtcttgccggtgcctgtaccggcctcggccagcagcaggtcgcgctgctgcagcgcttcggcgatggcgtcggtcaggtgcagctgtgccggacgcgggacaaaggcatccagatgcgaggcgagcgcgccgccttcgctgagggcttcgcggctggcatggacaaggtcggacatcagagggagaggatacccggccgggcgctgcccggcacccgtttcaagccagggcaacagcaacggcaacagcaacagcgtggttcatggctctgggttgctgcgtgtttggcggggcgggaggggcaggcaggacacgccgtaaacccgtccatgggggctcgatggcgccatccatggcgccaacggtcctgcctgcccctcccgccccgccttcgacagtttcccagtgacggatgcacgcgcggcgtcgcgtcgagcttgctcgactgccctttcagaagcggtgggtggaacggaaacaagaaggggtcgtatccgttttcctgcggaaaacggatacgaccccacaacgagtgcgcgcagcgcgcgacccgcttttgattttctttttcttttccgtggctggacgcacacggaaactgtcagaggttgggcggggtgggttcgcgggggtgtccgcggcatggatgccgcggccaagcccccagggacgggttcacggcgtcccccgcgaacccactccgcccggccaagcgcggcttttgcttctggcttcagcgaccaacccacagccacgaggggctgtgccgttggctgaaaactcagtaccgcttgatccccggcaccgtgcagccctcaatctgcgcatgcgccgacaccgcattctccttctcgccccgcgccaggcgcgactgctcgatcgtcgcccaatgccggcggcacagcggcccggtcttcgagcccagatccaccgccttgcgcgcgaacgtctccgcctgcgcccactggccctgcagcagcgccagttcggcacgttcctgcagcactgccgggtcacccgccacgatctccagcgcgtggtccaggctgctggccgcgccggccaggtcgttcgcctggcgttgtgccagtgcggttacccgcagatcttccacctgcgaatcacgcagcggctgtaccgacaattccttgtcgtccggacccgctgcagcatccaccgcagccaggcgctgcgccggcgtggtggtatcgaccggcttgaccaccggtggtgcgctgctcacgcaggcggccagggccaggctgaggccggtcagggccaggggctgcagcagggatcgcatgttcatcggcatcatcggctcgggggaggagtggcggcggcaggtgccgcggcaggttcggcaggcgcttccggcttgcggtccaggccgaaccagctgcgccagccaccgccctcgccttcggcctcgccctgcccctccggcgacgcggccggcgcgcacggcgcataagcaggcgcatagcccaccacgaacgggaaacgacgcgcgccggggcagccttcatcggtgctgttgaggccggtgggggccaccgactgccagtccaggcccttgttgctgacccgcagcggcgcgctcggcaggcgctggaagatgcccgaccagacccgcatcgcgccggtggcgccatacaggccggcctgcgcgttctggtcgttgccgatccagatcactgccaggtgatcaccggtgtagccggcataccagctgtcacggccatcgttggtggtgccggtcttgccggcgggctgcaggcggccgaggccatcggcattgagccgctgcgcggtaccgctggcgaccacctgctgcaggccgacactgatcaggttggcggcaatcgagtcgccttcctgcgccggtgccggggtcttgtcgtatcgcttgagcagcttgccctgcggatcgagcacgccacgcaccgcgtgcagcggctggatctcgccgccggacgccaggaactggtacagctgcgccatcgcgtacgggctctggtcggtcgagccgaggatcaccgccgggttggcgtcagccttgatgccggccaggacatggatcagctgggtcacgcgctccgggccaacctgcatgcccacgcgcaccgtggcctggttgtaggaatgcgccagtgcgtcgatcaggcgcaccgtgccgtggctgcggttgtccgcgttgccgggactccagttgcggccgcggccgagctgcaccgtcaccggcgaatcatccacccagctggccagcgagtaacggtccggctgcgccagggccagcaggtagacgaacggcttgagcagcgaaccgaccggacgctgcgcctcgatcgcgcggttgaagccgacctcggacacctcgcggctgccgatcaccgccagcacgtcgccgttgtgcacgtcggtcagcaccatgccggcctgcagctcggggcggcgcttgctttccagcgacttgatggtgcgggtcaccgcgccttcggcataggcctgcgcggacggcgacatgccggtcatcacgctcaggcccgcgccctgcagcgccgattccggatagtcatggccgagctggcggcggaccaggtcaacgtaggccgggaagcggttggctgccaccaggccgggcgtcttgggcacgcccagcggtgccttcagcgcgcgctggtactcggcatcgtcgatcagcgtggcctcgtgcagcttgcccagcacgaagttgcggcgatccagcgcgcgctccgggttgcgccgcgggtcgtagaaggacggccccttgaccaggccgatcagcagtgcgatctgctcggtctccagcgactgcaggtcacggccgaaccagaactcggcgccggaggacatgccatggatcgcctggctgccgcgctggcccaggtacacctggttgagataggcctcgaagatggtgcgcttgtcataacgcgcttccatgatcagtgcgtacagcacctcattgaacttgcgggtgaccgtctgctccttgccgatgccgagcaggccgctgcgggccagctgctgggtcagcgtcgaagcgccctggcggctctggccaccggaacggatcgtcacccacaccgcgcgcgcgatgccggacaggtcgatgccgtggtggcggttgaagtccttgtcctccaccgcctgcaggccagtcaccagcaggtccggcgcctcgtccatgcggatcaggcggcgctcttcctgcttctggccgtacagggtggcgatgcgcgccggatccagccgcgcggccttcagcgccttgcggttgtcggcgtcgcgcagcgaggccacgccgccatcggccagcgacagctccacccggcgcggggccacccggccgtcaacgtcgttgaagccgcggctggagatgacgaagcgcccgccgttcaccgcataggtggccggctccttgccctgcccgtcatcgcggtaggcagaggcggccagctcggtcttcagcgtagacgcatccatcgccttgccgggggtgagcaccagcgggcgcgcgtacacgcgcgtcgggatctgccagcgcagttcaccgaaacgctgggtcacctgttggttcaggtacagcgtatagggaatgaggaaacccaatcccaacgcgaccgcagccatgctccaggtgatcagccggcgccgccacagcggaccgttgtcctgctggtcgtcgtcggaatcgtcgatgtcgtcggaatcgtagcgtcggggcacgggaatgcgagaatgtagggtctggcgagtctaccccagccgctgcggctggcgaattctcccgggttcccctgcttaagctggagttgcaaccggatggcgatgtccctggccgagatccgatacctgatcaaccgcctgtcgggcctggcccgccggagcctggcaagcctgcgcacccgtggctggcgtgccacctggcaacgcatccgcgtgcatgcccagcgcgccgtccccgccccgcgcacgccactgttcctgccgccagcgcaggatttcgcccccttcacggtgccgttcagcgagtcgccggaggtgagcatcgtcatcccggtctacaaccacgtcgcccacaccgtggcctgcctgcgcgccctggcggcgcacccgccggccgccgcgtgcgagatcctggtagtggatgacggcagcagcgatgccaccgtgcagtggatgccgcaggtggccgggctgcgctatgaagtgcgcgcgcacaacggcggcttcattgaagcctgcaatgacggtgtatcgcgcgcacgcggccgctacgtggtactgctgaacaacgatacggtgccgcagccgggctggctcgacgccctgctggacaccttcggcagcgtgcccgacgccggcctggtcggcagccagctgctgtacccggatggccgcctgcaggagtcgggcggggtgatcttcgccgatggcagtggctggagctacggccgcttcgaggccgccgatgatccgcgctttgccagcctgcgcgacgtcgactactgctcgggcgcggcgctgatgctgccacgcgccctctggcagcagctggacggcttcgacacccgctacaagccggcctactacgaggacaccgacctggccttccgcgtgcgtgcacacggcctgcgcgtgctggtgcagccggccagccgggtgatccacgacgaaggcaccagcaacggtaccgacaccggcagcggggtgaaggcctaccaggtacgcaaccaggccatcttcgccgcccgctgggccaccgaactgggccgtcatccggcggtcggcgaagtgccgtctccggcgctgctgctgcgcggccggcgccaggtgctgatcctggacgaggaagtaccgcagccggatcgcgattccgggtcactgcgccaggtcaatctgatccgcctgctgctgcagggcggcgcccacgttgtgttcgtaccgacccggcgcgagcacgccggtgcggccaccgaagcgctgcaacggatgggcgtggaagtctggtacgcgcccttcctggacggcgtagccggctggctgcgcagccacggatcgcgtttcgacgtggcaatgctggtgcgtcaccacgtcgcccacgaatgcctgccgctgctcaagcgctatgcaccgcaggcacggaccgtgttcgacaccgttgacctgcactacctgcgcgaacgccgcggtgccgaagtcgccggcgacgcaaccctgctgcgtgcagcggaacgtacccgcagcagcgaactggccgtgatggagcagtgcgacatcaccgtgctggtcagtgcggccgaacgggagcagctgcagtccgatgcgccgcaggtgcgggtggagctgatctccaacctgcatgaggtcgccggtgccggcgccgtattcgagcagcggcgcgacctggtgtttgtcggtggcttccgtcatccgccgaaccttgacggcatggaatggttcatcggcgaggtctttgcccgcatccgcgcccggttgccggaagtgcgcctgcactgcatcggcgccgcggcgccggagtcgctgctggcactggccgcacgccagcccggtgtgcagatgcacgggttcgtcgaagacatcacgccctacatggacggcgcgcgcatcgccattgcgccgctgcggttcggcgccggcgtgaagggcaagatcaacctgagcatggcccacggccagccggtggtcggtaccacctgcgccgtggaaggcatgcacctgcatcccggccaggacgtgctggtggccgatgacgctgtcggtttcgccgatgcggtgatccgcctgtaccaggatccacagctgtggcagcagttgtccgatgccggcctggccaacgtcgcccagcatttctcacttgatgccgcccgcgcgaccgtgcagcgggtgttcttcgcctagtccgcccgtccaccggcgcgacgcaggcggtcttcgaacgccggcagttcggccaggtccggttgcagcaaccgcgcctgttcggcagcgtgcgcggcaaaggccaggtcgccattgccgagccgttcgctgccgatcgccagccagcgctgggccaaccgcagccgcgccgagggcaggcccgctgcggtcggtgacagcgtctgccaggcctgcaggcaggcacccgccgcctgtacccggttctgccgcagattgtcgtcgaagcagcggcgactggcgggcagcaggcgtgctgcggcagccttgacccgcgtgtcgcggggggccagtgactgggcttcgcgcagtgcgtcgaacgcgctgtgccccggtgggctgatccactgccctgcacgttcggcacgctcgatcttgcgcaggtggtcgcgcagctggcgttcgcgctgcgccgtactgatcgcgggctgctgcagggcctgttgcgcctggcgcgcacgctgcaggcgctgtgccagttgctgcaggattgcctgcgaagcgcccagctccgccgccagggctgcatcgcgttgcgccgcatcgaactggaagtcgtcggcggatgtctggctgcgcacgaccaccgcctgcagcgcctgctcacgcccccgctgggcattgggatcatcggccgccaccgcaagcactgccaggaaaccctgggccgcggcgtccagctgctgtcgttgcagtgcccgctgcgcctgccgcaggcgctggtccaccgcgcgcgccagggcttcctcgctggccggcagatcggcatgaccggcatcgaactggcgggcacgacgcaggatcgcggccgcctcggccagctctccgcgccctgccagcgtgcgcgcctgcagcagcaggtcgctcagcgcatcttcgcgaccttccagcgccggcaggttgtccggctgcagggcaaggatgcgctggaacaagggcaacgcactgctgtcgccatcatccaggcgtccggccgcgaacgcgttgcgcgcctgggccaacaacgcaccaataccggctccggcactgcgtcgcgcctgcagctggcgggcgaccgcatcggcttcgccctgcggcacctgcagctcacgggccagtgccagtgcctgcgcgctgccgtccaggtcaccggcgtgcaggcgatcgcgcgcctgttgcagcgctgccgcgccggtattggccaggccctggcgcgcctgcgggcgatcaccgtccagcgccagcaccgcctggtagcgctcgcgcgcaccactgccatcgggatcgctcaaacgaccggcggccagcgcacgatccccctcggccagcagctgttcgatctgcggctcatcccagaaccagtcggccagcggcttgcgcagcaggaccagcagcacgaacacggccagcgccgcaagcagcgcccagcgccagacccggcgcgcatggcgtgcctgcagccaccaccagcgaccctcgcgacggacgcggtccagcgcaggatgttcagcgccatgcgggcgatgcgggggctcgcgttccatgcgtgcagggtagccggggcagcgtgaagctcagccgaggcgacgtgcctcgctcacgcccggcagcgcatcaagcttgcccagcagcgtcgacaactgcccgtagtcgctgaccttcagccgcagccgcagatgggcacggccactgttgcgcacgttgtcactgtggatgtcgagcacgtaagcgtcttcctgggcgatcaggttggtgatgtccttcagcagccagcggcggtcgaccgcgtcgaccaccacgtccacttcgtagccgccaccggcctggccccactccaccggcaggatgcgctgcgggctggcggcggccagccgggccagcgcggcgcagtctgcacgatgcacagtgacaccacggctacgggtcaggtagccgacgatcggctcgccggccaccggctggcagcagcgtgccagctgcaccagcaggttgcccacgccctgcacggtgaacttggacttgcccaggttctcgcggcgcgcggtcggccgcggcagggtcggcgcgggcgcgggctggctggcggcacgttccgcctctagcaacgtccggctgacctggttcgggccggtatcgcccagcgccacctggatgtacaggtcatcgacgctgtcggcatggaacttcttggccgcgacggccaggtccgagtgctgcaggcccagccgcttcagctcgcgctcgagcagctcgcgaccggcctgcacgttgcgcgcgcggtccagcttgtggaaccagctgcgcaccttctcgcgcgagcggttgctggccaggaagccattggccggcatcagccagtcgcggcgcgggtcggcctccttgccggtcaggatctcgacgcggtcgccactgcgcaggcgataggtcagcggcacgatacggccgttgaccttggcgccgcggcagcggtgcccgaccatggtgtgcacctggtaggcgaaatcgagcggcgtagcgccctgcggcaggtccagcacctcgtccttcgggctcagcgcatagacccggtcctcggtcagctcggcatcgagcgccccggccagttcattgccctgcccgtcctgcgcctgctccagcagctggcgcatccaggtgatcttgcgatcgaaggacttctccgcgcccttgccgccttccttgtacttccagtgcgcggccacgcccagctcggcctgcgagtgcatttcatgggtacggatctgcacttcgatggtgcgaccttccgggccgaccacggcggtatgcagcgagcgatagtcgttggccttcgggcgtgcgatgtaatcatcgaactcgcttggtaccggcgcccacagcgcgtgcaccacgcccagcgcggcgtagcaggcggcgacgtcgtcgaccatcacgcgcaccgcacggatgtcatacagctggtcgaaggccagccgcttcttctgcatcttccgccagatgctgtagatgtgcttcgggcggccgctgacttcggccctgatgccctgggcgaccagctcgcgcgacagcaccttcttgacgttctcgacgtaacgctcgcgggcgatgcgggtttcgtccacctcgcgggcgatgcggcggtaggtttccggttccaggtggcggaacgccaggtcctccagctcccacttcagctgccagatgcccaggcggttggccaggggcgcgtggatgtcgcgggtcagctgggccagcgcgcggcgttgctcgtcgtccagcttgtcggccgcgcgcatcctcgcgagctggcgcgccagcaggatcggcaccacgcgcaggtcgcggatgatcgccagcagcagccggcgcaggccctcgctgttgcgtccggcctcacggccggcgtgcagcgcccacaccgggtcggccgcatcctggccatcgagcaggccgatcaccgccgcctggtggctgcccagcggcagctggtccaggctggcgcgcaggcccggcaggtcgaacagcaatgctgccaccaccgcgccttcgtcggccgagagcatcgccagcgcatcgagggtatcgcccagcaccgaccaggtggcacgcatctggtggtcgcaatccggcgcttcccaatgctcgcgcagggcctggcgcagcggagcaggcagcaccgctgccgagggacggttcaacaaggcatccaggccagggacggaagcgcggttcacagcatcgagcaggcaagacagaggcccctacactagcgccggcgtcgttcagggacaatcactgcggccaccatcacccggcatgaagacatgccgctacactcgccaacacatccaggagagacccgccatgccttcgattgccctgcgcgtccgtccacggctgctggcctgtgccgccgtgttgctgtccctgtccgcgcctgcgctggcccagcgcgtggtggagggcgacctgcagcagcagatgtcgcccaccgagttcaaggccgccggcctggacaagctcagcgccgctgaactggccacgctcaaccgctggctgcagggcaaggtcgaggcggccaccacccaggccgtcgccgcagcgcgcgaagaaggccgccaggaagtgatcaagaagaaccgcggcttcctggacttcggcagcagcgaaccgatcgaaagcaccctgcagggcgaattccgtggcttcggccagggccgccgctacgtgctgcagaacggccaggagtgggagcagatagacgccacgcactattccggtggccgcaaggaagcgccgaacgtcagcatgcgcccaggcgtgatgggcgcctggtacatgaaggtggacggggtgaacgtgcaaccgaaggttcgtcgcaccaagtaacgcccgggcattccggccgtgccggatccatgcccggcggccatggtcgcccgatggggcgaccatggcgcgcgttcacgcctggcgaagtgcagccacccgctgcgccagcttcttcgccgaaatgccggtgcgtgcccccagctcctgcgcgaacaacgacacccgcagctcttccagatcccaacgcagcgcctgccattgcgggcgatcacgcaggccctgctgctcgcccgcttccagcgcctccaggaacgggtgcaattccagcatgcgcgcctggtcacgcggcggatcacgcttggcacgctcggtgcgcaggatcatcgccttcaggtagcgcgggtactgcgccagcgcgtcggccggcgtgtcgcgcaggaagccggggtggatcagcccggccagctgcgcttccatgtcgtccaggttgccacgcgcccagcccatcaacggcgcctccagcaacggcttcagttccgccaccagcgccaggatggactcggccagtttcagccgcgacatcgcctcgccgaacagggccttggccgcatgctcgcggcgttgctcgaaggctgccgcatcgcggatgtcttccaggccttcggccagcaccgcgttcatcgccgcatccaccaggtctccacgcaggcgttcctgcgattcgatcgcggcatacagcaggccggtcttggcacccaccggcagctgcttgcgcgcctgcttgaccttctcggccagggcaatctccagcagccggcgcacacccatggggtgggcctcctgcgcctgctggcgatcggcgaagatgcgcagcgccacgctgtcgccctcgtccagcagcgccggataggccggaacgccggcttcaccgggcacctgcagcggaatcggcgcggccgggaacgtgcgcaggccatcggccgccatctcgcgccccgcgcgtgcagcgaaggcatcgccggcacggccgccgaatttcgcgcgcaacgcatcgagatcacgcgagatcgccagcaccttgccgtgctcgtcgcgcaggcgcaggttcatgtgcaggtgcggttcgatcgaagcgggttcgaaatcgagcgccgtcaccgtcgcgccggtggcacgtgacaaaaagcgcgccagttcgccagtgatggcatcggcgctgggctgcgggaatgcctcgaagaacgcacgaccgaagtccggcgccggcacgtagttgcggcgcatcgccttgggcaggctgcggatgagtgccgaggccttgtcggcgacgaagccaggcgccagccagcccagctgcaccgggtccagcgcgttgagcaggtgcagcggcacgtccagggtcacgccgtcatcatcggcacccggctcgaagcggtagtgcagtggcaggcgcgcctggcccagtggcaggtacttcgggtagcgctcctgttcgctgccctcacccggcaacaggtcgaccagtgaccagtgcagggtcttgcgctgttccggcgccagccccttccaccaggtatccagccctgcggccgaatggatctgcggcggcacccggtccaggtaccagcgcgcctgccagtcctcgtcggccacgatgccggcgcggcgcagcttcgcttcctcctcgcgggcgacctccagcactttctggttgtcggccacgaagctggcgcgggtgttgatctcgccggtcaccagcgcctggcgcacgaagatgtcgtgcgactcgcccggtgcgatgcggccgtagtgcaccggcttcttcggtgccagcaccaggccgaacaggctgatctgctcggaggccagcacctggccctgcgcgcgcgaccagtgcgggtcgaagtgcttgcgcagcagcaggtgcggcagttcggcgatgacccagtccggctcgatcgcggccagggtcatgccccagaccttctgcgtgtccagcaggttggccaccagcaaccacggcggcgggcgcttggacagcgccgaaccggggaacggcaggaaacggcgctggcgtggcgcctggaaatcgcccttctcggtgcggtgcccgatctgcgtcggcaggcccgccaccaacgcccggtgcagggtctggtaggcagccgcgcgcacgcgttcgctgaagccgccgcccgccggtgcctgctccttctgtgcacgtacggccaccggcgtcggcgccgcttcggccttgccttcgcgggccaggcgtgcagcgcggtgcagctggccacgggtggccttcactgcggcggcatcatcacgcgctgccgccggcgcactgctgccggccagcaacggcgccatcgacgcctcgttggcctcttccttccagcccagttcctcgcacagcagccgcagctggcggtgcagctcgcgccactcgcgcatgcgcaggaagccgaggaaatgacggccgcaccagtcgcgcagcttggactgggtcaggtcttcatgggcctgccggtaggcatcccacaggcgcagcacgccaacgaactcggaacgaccatcggcgaactgcgcatgcgcgctgtcggcggcaccgcgtgcttcgggcggacgttcgcgcgggtcctggatgcccaggaacgaggcgatcaccagcatcggccgcaggcagccggcggcctgcgcggcgaccagcatgcgcgccagcttcacgtccaccggcaggcgtgccatctgcttgccgatggtggtcatgcgccgctcggcgtcgatcgcacccagttcggtcagctgctgccagccatcggccaccgcacgctcgtccggcgcttccaggaacggaaactcctcgatgcggcccaggcccagctgcagcatgcgcaggatcaccccggccaggctggagcggcggatttccggatcggtgaactccggccgcgcctggaaatcggcttcggcgtacaggcggtaacagatgccctcggcgatacggccgcagcggcccttgcgctggttggcgctggcctgcgagatcggctcgatgtgcaggcggtccagcttgttgcgcggactgtagcgcttgacgcgggcaaagcccggatcgaccacgtagcggatgcgcggcaccgtcagcgaggtctccgcgacgttggtggccagcacgatgcgccggttcggcccgggattgaacacccggtcctggtcctggttggacagccgcgcatagagcggcagcacctcggtgttgcggtacttgcggcgctccagcgactggtgcgcatcgcggatctcgcgttcgcccggcaggaagatcagcacgtcgccgcgcgcatccaggcgggtgatctcgtcgatggccgacacgatggcgtcgttgacggtgcgttcgccctggtcttcgccctcgccttccagcgcgcgatagcgcacttccaccgggtaggtgcggccttcgacgctgatcaccggcgcattgtcgaaatgctgggcgaagcgttcggtatcgatggtggccgaggtgacgatcagtttcaggtccgggcgcttgcgcagcagctgcttcaggtagcccagcaggaaatcgatgttgaggctgcgttcgtgcgcctcgtcgacgatgatcgtgtcgtagttcgacaaccagcggtcactggcgatctccgccagcaggatgccgtcggtcatgaacttgatgcggctgtcgtcgctgaccttgtcgttgaagcgcacctggtagccgaccaactggcccagttcgctctgcagttcctgcgccacgcggcttgccaccgcacgtgcggcaatccgtcgcggctgggtgcagccgatcatgccggcctggccacggcctgcggccaggcacagtttcggcagctgggtggtcttgcccgagccggtttcaccagcgatcaccaccacctgatggtcgcggatcagcccgatgatggcgtcggcttcacgcgcaatcggcagctgcgggtccagagtaatggacggctgctgctgcgcccggacctgccggcgctgcaccgacgcctgcaaggcctgctcgaaggtagcggccaacgccgcatcctgtggcttggcctggcaacgcgagagcatccccagcaaacggccccggtcgcggctcatggcgccgtcgatggcggcgcgctgttggcgcaggcgggacgatggatttttatcgatagagttcatcaatcggttcgttcaaaactttgatagcgaccagtcatcacgaccggtttattgtgaaggccaacgattccacaaggaggaaccccatggcgaagaccaagagcacgaccaaggccaagaccggcaagcagaagcttgcagcggcggcaccgtcggcgccgaacatcgatatcgggatcacccagggcgaccgcaagaagatcgccgacggtctgtcgcgcttccaggccgatgcgttcacgctctacctgaagacgcacaacttccactggaacgtgaccgggtcgatgttcaactcgctgcacaccatgttcgagacgcagtacaccgagcagtgggcggcactggacgacgtggccgagcgcatccgcgcgctgggcttcaatgccccgggctcctaccgggaattcgctgcgctgacctcgatcgccgaggaaccgggcctgaccgacagcgcggactggcgtgaaatggtacgccagttggtggtcgccaacgaagcagtctgccgtacggcacgtgaagtgctggaggtggcggccaagggagacgacgccccgaccgaggatctgatgacccagcggctgcagacccacgagaagtacgcctggatgctgcgctcgctgctgcagtaagagttggggggcccggcaggactgcgccctgcacccgcagaggccttaaagccaaggccagagccagagcaaaagctggcctcctgtgggtaggcgggatgggtccggtggcaggggacgccgtaaacccgtccttgggggcttggccgcggcatccatgccgcggacacccctgccaccggacccaccccgccttcggcagttctccgcgatctgccggcaaagccattggggtcagatccgttttcctcaggaaaacggatctgaccccattttgtttgtcgagttctgacagttttcatccacgcatggcgtggattgatctggcccccgtcaccgggaaactgtcgggggtggggcggtgtgggcttgcaggaccgttggcgccatggatggcgccatcgagcccccaaggacgggtttacggcgtgtcctgcaagcccacaccgccccgcccaataagcagacagcccagagccggctgttgcctttgacgttgcactggcttgcagcaggtgcagggcgcagccctgccgaacccctacccctccctccggggtaaactaaccggatggcttcccgtcccgcgcacgacctgctccaacgcgtctttggttacgacgatttccgtggtccgcagcaggacatcgtggagcatgtggctgccggtcacgatgccctggtgctgatgcccaccggcggcggcaaatcgctgtgctaccaggtcccggccctgctgcgtgacggttgcggcatcgtcatctcgccgctgatcgcgctgatgcaggaccaggtcgaagccctgcgccagctcggcgtgcgcgccgagtacctgaattccaccctggatgccgagactgccggccgcgtcgagcgcgaactgctcgccggtgagctggacatgctctatgtcgctcccgagcggctgctgaccggtcgcttcctgtcgctgctgtcgcgcagccagatcgccctgttcgccatcgacgaagcacactgcgtgtcgcagtggggccacgacttccgcccggaataccgccagctgaccgtgctgcacgagcgctggccgcagatcccgaggatcgcgctgaccgccaccgccgatccgccaacccagcgcgagatcgccgagcgcctggatctgcaggaagcacgccacttcgtcagctccttcgaccgccccaacatccgctacaccgtggtgcagaaggacaacgcccgcaagcagctgaccgacttcctgcgcagccaccgtggcgaggccggcatcgtctactgcatgtcgcggcgcaaggtcgaggagaccgctgaattcctctgcggccagggcttcaacgccctgccctaccacgccggcctgccgccggacgtgcgcgcgaacaaccagcgccgcttcctgcgcgaggacggcatcgtgatgtgcgccaccatcgccttcggcatgggcatcgacaagccggacgtgcgctttgtcgcgcataccgacctgcccaagtcgatggaaggctactaccaggaaaccggccgcgccggtcgcgatggcgaggccgccgaggcctggctgtgctacggcctgggcgacgtggtgctgctcaagcagatgatcgagcagtccgaggccggcgaagagcgcaagcagctggagcgggccaagctcgaccatctgctgggctactgcgaatccatgcagtgccgccgccaggtgctgctggccggtttcggcgagacctacccccagccctgcggcaactgcgacaactgcctgacaccgccggcctcgtgggacgcgaccattccggcacagaaggcgctgagctgcgtctaccgcagcggccagcgcttcggcgtcggccacctgatcgacatcctgcgtggcagcgagaacgagaaggtgaagcagcagggccacgacaagctcagcacctatgcgatcggtcgcgatctggatgcgcgcacctggcgcagcgtgttccgccagctggtcgccgccagcctgctggaagtggacagcgagggccacggcggcctgcgcctgaccgacgccagccgcgacgtactgaccggccgccgacagatcagcatgcgccgcgacccggccagcagcaccagcgggcgcgagcgcagtgcgcagcgtaccgggctgtcggtactgccgcaggatctggcgctgttcaacgccctgcgcggcctgcgtgccgaactggcccgcgaacagaacgtgccggcgttcgtgatcttccacgacagcaccctgcgcaacatcgccgaacagcgcccgaccagcctggatgcactggcacgggtcggcggcatcggcggcaccaagctgagccgttacggcccgcgcctggtcgagatcgtgcgcgaagagggctgacggtatcgcgttgccgcgctgcgcggccgccgggcatggtcccaacggcgcgcgggcgcccctgtagagccgagcccacgctcggctgcccctgcgcgaacagcagccgagcgcgggcccggctccaccttggtgcagctccaaccttgaaccggccattcagccggaagtgcatccgcgcccgcttgcggctagattagcgccatgtccctggcctcgaccctgcttcgtgtcgtgctcatgctcagcctgttgctcaacgggctgaacgcggccatggccagcggtcatgaagaaatggggcggatggcacacgccgtcgcggccgccgcagctggcggtgacgccgactgccaccacgccggcatgcaggccgacccggccccgcaggccaaggcccccgcccacgacgcccactgccagatcaaggactgcgtgcgcagctgtgcccagcacccgttgctggtggtgcagccgttgccgttcatggccggcccggcgttgtcgctggcaccacagccgatgccggccaccggccgtccggcgccgccgctgccgccgatctcacgccctcccatcggctgattccacatgcaccgtgcgccctgcgcaccgtagccggccacctgccggcgtctttacgtgtatggagtcaccaccatgaatacccgcattccccccggtccgggcgccgtgcccatgccgtcgcgccgcctgttcgtgcagggcctggccgccggcggcgtggttgccggcatcgccgccgtcggcgtaccacagcgcgcgctcgccgccgccacggccaccccgcgcctggccggcgctttagccgtgctcagcgacacccgcatcgaactggccatcggcgaatcactggccaacttcaccggccgcacccgcccggcgatcaccgtcaatggatcgctgccggcgccgatcctgcgctggcgcgaaggccagaccgtggacctgttcgtgcgcaacacgctggaacgccacccgacctcgatccactggcacggcatcctgctgccggccaacatggacggcgtgcccggcctgagcttcaacggcatcggccccggcgagacctaccactaccacttccagctgaagcagtcgggtacctactggtaccacagccactcgatgttccaggagcaggccggcctgtacggcgcgctgatcatcgatccggccgaaccggcgccgtaccggcacgaccgcgagcacgtgatcatgctgtccgactggaccgacatggatccgggtgcgctgttccggcgcatgaagaagctcgccgagcatgacaactactacaagcgcaccctgcccgacttcctgcgtgacgtgaagcgcgggggctggtcagccgcgctgtccgaccgtggcatgtgggggcggatgcggatgacgccgaccgacatctccgacatcaacgcccacacctacacctacctgatgaacggcaccgccccggccggcaactggaccgggctgttccgcagcggcgagaaggtgctgctgcgtttcatcaatggcgcctcgatgacctacttcgatgtgcgcattcccggcctgaagatgaccgtggtcgccgccgatggccagtacatacatccggtcagcatcgatgagttccgcatcgctcccgccgaaacctacgatgtgctggtcgagcccaccggccaggacgcgtttaccatcttctgccaggacatgggccgcaccggcttcgccgccggcacgctggcggtacgccatggcctgcaggcgccgatccctgcacgcgacccgcgcccgttgctgaccatgagcgacatggggcatgacatgggcggtggcggtcatggtgggcacgacatgaccgcgatgaagggcatggaaggcggctgcggcgccagcatgggccacggtgcgcatggcggcggtgatgccgccagcaaggcgccaaagcacccgcccagcgagcgcaacaacccgctggtggacatgcagagctcggcgaccgaaccgaagctggacgaccccggcatcggcctgcgcgacaacggccgccaggtgctgacctatggcgcgatgcgcagcctgttcgaggaccccgatggccgcgagcccagccgtgagatcgaactgcacctgaccgggcacatggagaaattctcctggtcgttcgatggcattccgttcgccagcgccgaaccgctgcggctgaactacggcgagcgcatgcgcatcgtgctggtcaacgacaccatgatgcagcacccgatccacctgcatggcgtgtggagcgatctggagaacgcgcaggaggaattccaggtgcgcaagcacaccatcgacatgccgcccggcacccgccgcagctaccgcgtgcgcgccgatgcgctcggccgctgggcctaccactgccatctgctgtaccacatggaagcgggcatgatgcgcgaagtgaggatcgaagaatgagccgctcactgctttcccccagcctgctggccctgggcctggccgccgcattgccggtgttcgcgcagtcgcacgccgggcatgacatggccgcgatggatccgcccgcaaagaccgccaacgcgccggtcgaacaggccgatcattcgaagatggattcgggcgccacagatcatgccggcatggatcactcgaagatggaccatggcgcgatgcaaccggcggcgatggaccattcgcagatggaccacggggcaatgggccatgccacgcccgcgcccaccgaaccgcgcgaccccatcccggtgccgtccgatgccgatcgtgccgctgcattcccaccgatcgcgcacggcgcgatggagcatgcgccggagatcaacagcctgctgctgatcgaccgcctcgaacattgggacggcaagagcagcaacggccaggcctgggaggccaccggctggatcggtggcaacatcaaccgcctgtggctgcgcaccgatggcgaacgcagccgcggccgcaccgagtcatcgtcgctggaagcactgtatggccgcagcgtgtcgccgtggtgggacgtgctggtcggcgtgcgccaggacttccgcccggccgactcgcgcacgtgggcggccatcggcatccaggggctggcaccgtacaagttcgagagctcggccacgctgtatatgggttccggcggccaagtgctggccaaggccgaggtcgagtacgacgtgctgctgaccaaccgcctgatcctgcagccgctgctggaagccaccatcgcggccaaggatgaaccggagtacggcattggtcgcggactgaacaaggtcgaagccgggctacgcctgcgctatgagttcagccgccgtttcgcgccatacatcggcatcagccacgagcgcacgtttggcgacaccgccgactatgccggtgaccacgcgcgcgacacacgctgggtggccggcgtacgcatgtggttctgagcagcggttcgtgagcaatggccagccccggcagccgccggggccggctacactgcgccacgttccagtgcaggcaccgccatgtcgttgcagatccgccgcgccacccttgccgatgtcgatgccctgtcggcgatcgccatcaccacctacaccgaaacctggggcgactcgtaccccgcgcaggagctgcatgatttcctgcaggcgcgctacagcagcgaaccgcagcgcactgaactgtccgacccacgcagtgccatctggctgctgatggacggcgacgccgtggtcggctacctggccgccggtgccaacaccctgccgcatgccgatgcacgcgagggcgacatcgaactgaagcggttctacatcctggccgcacaccagaacggcggccatggtgcacgcctgatggacgcgttcatggcctggctggaccagccgcagcgccgcaccctgtgggtgggcgtatgggaagaaaacttcggcgcgcagcgcttctacgcgcgctatggctgcagcaaggtcggcgagtacgatttcatcgtcggtgatacccacgaccgcgagttcatcctgcggcggccatgatcatgcagcccatgtagcgtcgagccatgcttggccagggtctgcaatatccagtcgagcatggctcgacgctacaaactagaaatcgaacagttccgacaggaagctgtccttcttctttttcttgtagccctggccccggttgtcctcgtagcgctggccgaggtggcgggtatcacggtgcatcaccggtggcggcgacgccggctgagcctgcacgggcgctggcggcggtacggccgcaccggcgcctgcgcgctcgatgatcttgtccagctcgccacgatccagccacacgccgcggcaacttgggcagtaatcgatctcgatgccgtggcgttcggccatctgcagcgtctgggtcttgcacacggggcacagcatcggtattgctcctgtcggtctggtttcgactgtacctgcaccgcgatgactgtgcggcaacgcgtgaccgatggcacagggacttccggcgcgtgcccacatgcgtaccgcgcggcacactgcgcccttgttccacagggaatgcgtacatgaccgtgttgtcccgcctgcccaccaccgcgcgcctgttgctggtgctgctgggtgtcggccttggcctgaacctgcgggatatcgccgcggccatcggcacaccggttcccgcactgcccatcccctatggcggcagcctgttggacaacgcgctggcggtactggtgacactgctgctggccgcgctgctgcggccccgtgacatgggcctgatggccagcttgggactgcgcggaaacggctggggcggcccgttgtgggtgctgctggccagcctgccctgctggctgggactggcgctgctcggaactccgaacacggcactgactgcgctggatgccacgatgctggccgcgctgttcccgctggccgaggaagtgctgttccgtggcctcggcttcgtgctgctggtgaagatcgtgcgcggtccgtggccgttgctcgcgctgccgcaggcactgctgttcggcatggtgcactggctcggcttcggcgggttcgacggcggcggcatcgcactgttcattggcgcggtgatcgcgctgggcggcttcatcttcgcctggctcgaccacctcgacggcgacaccctgtggtgcggcctgatcctgcatgtttcgatgaaccttgcctggaatgtgttcagcctcgatgacgccatcgcattgggttggcaggccaccggcctgcgcatcggcaccgccctgctcgcggtggcggtgctggcctggcacgtgcggttcaggcgccagagagggctgtaacgcccgcttagcttgccgtgcacgtcgggatcactgccggcttgcgcatacttgcgcgccttttcaccgttgctgtccggagttgtcgcgtcatgttgctgtccaagcgccacgttgaaccccgcgtcctgctcatcgaggacgccgaggaaacccgcgagctgagccgactggcgctggaaagccaggcctgccacgtagtgggcgtgagctctgccgaagcggcgctgggcctgctggcggccggtgagcgtttcgacctgctgttcaccgacgtcaatctgggtgcgatcagtggcattgaagccgccaaccgggtccgcagcctgtatccccagctgccgatcctggtgacgtcgggcatggaccagcaccaggtgctgccgcagctccgcgacggcatccatttcctgcccaaaccctacaacatgagcgagctgctcgacgccatccggctgtgcttccggcacgccgatgtgggcgtattgaccgggccggacgcacaggcggcctgaggcactcatcaaccgctgctgtacggcccggtacccgggaacaccttcagcagcgcgcgggtgatcatgtccgggtagacggtgaaatggtcctcgccgtcgatcaccatgttctccaccttcaatgatcgcccgctgctgcgcagctgctcggcgaactcggcgttgtggcgcagcatgtcgttgcgggtgaaatagcgcggctccggcttgaccgtttcgaagctgccgatcgacagcaccaccgtggtcggctgcgcaggcgccttggcttcggccagcatgcgcggcacccgatggttgtcgaaccacagcgacgggctggacaggatgtagctgcggaacatgtccgggcgcgtggtcagcacgtaggcgccgaacaggccgccataggaatgaccggcataggctcgccgcgccggatcggtgcggtagcgcgcatcgatcagcggcagtacgcgctcggcgaggaagtcgcggtaatgcgcggcgccgccgtagctgacgtcgtcgctgtagtcacgcggatcggtgcgcgccggatcgctcggcgtgtaatcccgcgagcggctctgcctggaggtcaggccttcctgcggcggcagcccgaccaggatgaaatcctcgatgttgacgcccttctgcccgaccaggttgcgcacgctgcgcaccagcgggaagctgtacagcgcatcggtcacgtacagcaccggatagtgcttttccggatgtgcggcgtagtcggccggcaacgccacccagatcgggtaatcgcgtcccaccgggtcgtgcacgcgcagcgcctcggtatccggcagcaccacgccctgcgcggcggtggccgcgctttccttcgcttcatccggagttgccggttgcgccaccgacatcgcacagccccccatggccaggcaggccgccacactccatccacgcacacgctgcatccacactctcccgttgcgggcgacgcacccgggtggcgtcgctaccgcatcctcacacgtcgcgcggcgccgcgccacgcgcggtcagggcgaggccggcggcggcgccgggaacagtgtgcgcagcgcctgcaatgcggccgggtggtagacggtcgcgtgggtttcctccggcagcggcaggtacttcaccagcggcgacggcgaggcctgctgcagcagcgcggccagtcgtgccgtggaggcggccagttccggttgcccgctgctggccaggaacacgtgcggctgtgcacgcgtcaccgccggcagctgccgggatgctccggccagcatcgcaccacggttccaccacaggctggggtccagcgcgatatagctgttgaacagcgtcggctcctgcagcagcgtctcgaccacgaacaggccagccagcgactcaccgatcagcgcacgctcgtctgtggtcgggtagcgctggcgtacctgcggcatcagttcatcgcgcaggaagctgcggtaggccgccgagccaccgatgcgtggcgcgatcttctggtcctgcgggtcgctgctggggccggtcatgtcgcggcggcgctcggtattctcgatgccgaccagcaggaacggacgcatgctgccattgccggtcagcacctgcaccagccctgccacatgcaggaaatcctcgccgatgccgccatcggccatgtacagcaccggcagcggcgccttcggatccaggccccagggctgcggacgatagacattgatgcggcgggtctcgcccagtgccttcgactgcacggtgaaggtctcgccgatgaccagtggtgcggccgcagcggtcgatgccggcggtgctgccgacacggtgggaacagctgcgaggcccggccctgcggcggccagcaggatcagggcggagagagcgacgacgcgcatgcgaacttccattttcgagaggacggccagcataactgcgccggggccctcaacggcgatccagttcgatcacggcctggcaggcacggagctggtcgtcggcatcgcgtccgattcgaacaagcgctgccgcaacctctgctcgtaactgggcgcccgcatcacgttcgccggtgcgggcggcggcttcggacagacggccggtatggcacgcggcgaggtcgtcgcgcaggcggagagtgccagcgcgcagggcagccaccacatcggcatccacctcggccgcgcgctcacgatcctgttcatgttgttcccccagtgaggccatcgcctcgctccgttcttcctgatcccggcgcaaccgccgttcggactgcaccgcgccggcctgttgctccacatcggcacgcgccatcgcgaggtcgctgcgatcaccgcgccaacgccagccagtcatgaacatcagcaacgaccacagcagcagcgacgccatcaccaccagcatgcgcggcatgggtcactgctccgccaggcaacgcgcgtggcgctgctgctggcgctcccacactccccagcacacggtgttggggcggccgtcgatgcgggttgaacagtcgtagccccctgcccgtctccacagcagcaaggcatcgcaggcctggtgatactcaccctgcagcagatgccggcgcatcgacgacgcgcgccagttgccgatgccgtactggtagaggaaatcgacatagacgtcgtactcgccctggctgagcgccacaccgggcagcgacgcgcggaactgcccttcctccctggccagatgagcctgcacggcatgcagcgcgcgtactggcgtggtgcggtcgcccagcctcaccggcgtgccatcctcgcgaacggtcgagccgaagccataggtgggccggtcattgcgcgtgggcaccactgcggcgtcggtgtatccctcgcggtcaacgatggcgatcaggcccgcagcactcagcgcaagcgcggcgaccaggctgcgtaccggcaatgtactgccgggccggctcattcgcgctccctgcggcgccattcgcgcagccagcgccagcccagataggcaatctgcgccgccaggtagatgatggtgaggaccacgaccaggcggtccagggtgatgccggctgcaagcgcaccggcgacggtaaccggcggcgccgacttgatggccgccgcgccggccgtgctgatgatttcttctttcatgatgggtcctggagggaatgcaggccgcgtcgcatcgacgtggcccgaagaggtgcccgccccgctgccggctcggcacgagggttgttccggtcgggaggcgggcggaagatcggttccgccgctcatgcggcctgggcgatgccctccatccagccacgtacgcgctggaagccaagttcgaccaggttgaggtaatgccggttggataccggccgctgcccgctgttggccagcagcagattcgccgtttcgaatcgttcgaccttgcgtcggccacgcccgcagtagtagccgcgcagcgcacaggccatcgccacgttgtcacgcgcgaccgccgtgatgatgtcttcgatctgctgcgccagctgatcggtttccagaggcttgtagccctgggcccgccccggcatgtcaccacgatgctcgatcagcaccgccagcaggttgcgcgactggaagccgaggtattcgcagtcgcgatgcagcgcatattcgccgccccagtgctccaggcggctgcggacatactcaccgaacgtatcaagctgcatgggtggcttctcctttgacgggcgacggggccggatcgaacacatccgggcgcagggattcgcggcgcacggcgcccgcagtggccagctcgatgcgccggcacaggcgcgcgccgggcagcttgtggccgcgggcgatcatgtagagggtccgcagcgcgcagccggtctggtgggccaggcggcgcatgacgggacagctgggggtgccgtagcccccttgggagatggcgtagtcgatgaggttcatgggccacacattactgccacggtaatggatagtcaataccgttttggtcatttgctggattggtaatgcagcgcaccatctacagatggacgccagtaccgctcgcaccctcaacatgcgcctccgcgtggccgccgccggcggcccggccgagtgggcccgcctgtacggtggcacccgctgggcccagccccaggtcagccagtggatttccgagagcaacccgaagagcatcggccatcggcttgcgcgcgatcttgaatcagtgatgcagcttccacatggaacgctggatcgcgtcgatcaggacggagacgtgtcgcttcagtctcaatctacgggactggatttcgagaaaatgagcgctgcggtcaaggtgctttcgcactacctggagctggtcggcgatccaccggaatggatctacgatcccgtgctgctggagaccgcattcatggtcgtggacgagttcggtcagccctctgcaccggacaatgtgctcgacctgacgaagcttctggcaagacggatcagggaggcaaaggatgactcacacgcgactcgaggagctcgcacagcggttggccgctaggacccaggaactgcgcggcgagcgcaccccggcgccggcattgcgggtggtggcgggagacgcacatgtggtccgcggggagaggcgcatggacgcgatcatgcgcgagtggcattgccgcatgatccgcaacgtacgccgacgctggggcgaacccatgcagcatgtgatcgatcaggcatgttgcggtgtggtcaacatcgagcagctcgccgacgacgcactgatccagttgcacaaggacatggagcgcgcggaggagtgcatccgcgagggcatttccttccacgatgccgggctgttgcgcgcgcattacggctgacagcgtccctggccggccggaaacggccggttctgatgagatcaattacctgaaattacctttattgttaccttaaaggtaatttttttaaggtgagcgacgtgggggcagcagcgacggaagcgggtgcgcggagcgccgcctccccgcacccgctgccagcgggcgccgggagtcgatagcacctgcaacaccgcatcgttgcagcggcgcttcccccattgcggaagtgctttgaaggaagcaacaaaaaaggcgccccttgggcgccttcttgatcgtcaatgcaatggtgggccgtgaaggattcgaaccttcgaccaaaagattaaaagtcttgaccatttgctttaaaaatcaataacctaagccaaagcatctttccgcacgcttcgcgtgaaacgcccgtggcatcaacggccccaactgtttttttccggtctgtcacctgctctcagccgggtgcatgccctgctccggactctcttttgtccagctaaactcaagcaattacgaacaaatcggagacgctgaatggatgaactcgcgatcaccatggctaagctggccggcactcgcaaaggcactgctgccgcgctcgaagagcaggtcaaagggataacagcgaaaatggacctccgccagtacttctcgattgacgacgtcgggccctactttagacaagcacacagtcaggtagagactcttcgaaagctgctgccatccctgtacggcgattttcgagttgtcgatgttgcacctaagggaatcaatgtaaaaacaaagaccccaaacggattgtttgcgcgctggcagcttgagagattggtacgtacgttggatgaggcgatagagattagagcaaacagcacacctgctcctgccagcacagctgcagcaatgcagcagcgcagactgttcctcagtcatggacgatctcctgcctggctggaagttcaggcctatgttgagagggacctttcaataagcacgatggagctagcccaggaggcaagctctggaatgacgatcattgagaagctggaaaccggtgctgaagcatgcgacgcggctgcaatcgtgatgaccggggatgatactgactccgccggccaggcaagagccagagagaacgtcatgcacgagatcggctacttccatggcaaatatgggaggcgccgagtagtgcttttgcatgaggaaggcgtcagcgtacctaccaacctgagcgggatcgtctacatccccttcccaaagggaatggtaagcgcggcattcggtgtgcttgctcgtgagttgaaggcgatctacgtctgatcaatcgaggcccccagcacgaggagcgttgagcgctaggaagaaatcaggcactcgacctgtagtgaacgaactccccgagaagcgatgattgcattgaacacctcgatcatggtgcgctgtagggcgttcacttgtaggcatacatgcttcgcgacatcagccctgtcttgatctggctccatcgactccattgtttccaccgacatcaaggccccggccctcaacgtaataatgagcgacagtcggtcgctcaagccggcatcaaacacgttcgtggtctcgcaaattcgatctattcgcgccgtattgaactgcttcaaatagaccagcagagctgcttctgcacctggtttggcacttagaagtcccaggccattcgaatagccggccgtctcggcatttccgttaatgaatgcactaattgaacgaagctgcgctatctccagtcctagatcgccagcaattagctgcgacaggcgggaagcgtccgaacgcctccgcgaccaggctgaggcacggtcataagcaaatacccctgcagcaagcagggccgacaatgctgtacccgccgcactgatggtgtctgccgtccagaatgccgactggctgctcatcgtccccccgctggtcaagttccaacctgcgaaggtatcagcaaacggcgattctgaaagacgcgacctgccttcgacttcgtctgtatggcacgcgctacccagccccatcgaaaggcggggaaatgtgcagcttggccaacctgttcgtccgcaccgcctctcgataggcctcgatcttggccacatcctcgcgcaggcgggtctcgtgcctgatcacccacatctcggcgccggcgcagccctgctcgtaactgctacaccggcgggacggcccgccgggaccatgtcggtgcctgtcgagactggcgatccacatcccatcgttcacccgttgtagcagtacgaccacccatacgccgctgcaagcgacgaccgtgggggcatcgtccgagaggctggcagagcgcgtcgtccagtagaagtcggggggcagcggcatggccggcaggatacggctgggcgtcgcaaacgctgcgacaagggcgcgggttgcaagcgtgagcgcgtgcggcggcagggaagctgatggccccttacgcgcgatagagtgcaatttttgaggtgaccacgggaaagaggtaacaaaggtaatcagcccatcaaactcggccatttaacttttaaaatcaattacttatgtgatctttgtgaaggtaacaatagggtaaccttcgagtaacccgattaccttttggggaggtaacatcggcagagtaaaaattccttatgaatcaatgacattactttgtaggcggcagaaaattacctcccatcacctcaaaaggtaatcacctttatgcttttgtaatcaaaggcttagaccctgttcggggcagcgtgttacctggttacctccttcccgtggtcacctcaaaaatcggacctgtcgagaagggccaaggaacgcccgcagagggcctcgcaggcgcccctctcgcgcagggaaccgcagggccaagcgatggctggaaaccccggagaacgccagacagggctggggctgggctttgctgcggggagtgcagaaaaagcaccctatgaagtgggcaggcgtggcggggagacgagtgcgcacgtcgggatgcaaacggcagaaacgtacgcgcatggccgtctgggtatggtggggcctcgcccgtcgcgctgaatctgtcttgcgcccctgccgcgagcgtggcgggggagacgaatgcgcgccggtggccgggacgcgcaatgcgtgagcgacccggtctcgcacgtcacctggctccccacccgtgcggcgccccgccacggaggccagtgcccgcccccctggcagccggacgggcaagtgacaccaactgaccggctcctagcaaaaggacgccaaggccgaccgggccacgggggctactgaccaggtggccgtttggtgagatgatgccgccctagggaagacgtgcttgctaggtcaatcgggaagactggagaatcgggatgagtcactgtgctgcctatccacccccgtgtgcgattcgcgaggatcgtctcgtgcgcccggcaacctattgccctaaatgccagaaagcggtcccggaagttctttccgcactggtcttttgatgcactttgtcagggggagtaatggctgtagatagaacaagatcgatgcactacaagcgtgcgaagctgctctctggcgcgccgctggacctgcaaacgctggtagctgaagcaatccgcgactctcaaacggttgatgcgcgagaagagggggacgcggttcgacgcgttctctcggggatcggtaacaccaatggcatgctgactgcaaagttcatgcagttcaccatcggtcagaaggcccatttcctagagaaggatagtgccaccggggactacaagctcgacactacggcggtgccagataacgatggcaccgcgcgtagagagttcgtggagtcgctgaccttcttggcgatctcgtcctcgcatgtgatgtttgttgcggcgttgcacctcggatccaaggcactcgaagagcacctgaactggttgctaaagaagttctcgaaaatcgaaaccagtgacttcatcatccttgcggatcagcagtcagcgagtgcagaacagcgtttggcccgccaccctgtcgacagcgtcactatcggcgccgagcttgactttgaggtagtcgagttagttaaaacgcagcgaaagacaaaggaccgggaaacagtgcccggatacaagagtgttcgtcctgtagggcccgtggccgatatgctcggttcactcataggggactggttcggtgacgtgccgttaaccaaggccctgggcaaggatgagagaattaaggccaccctgaagctgaactactccaaccggcgcaagtctgaagaaggcttcgagatgatgcagaagctggcggtagccggtcgtcatttcgatgctgatgaaacccgcgtccatcttcacaagggcggaacgttgagagggtccgacttgaaggtccagacgagcttgcaagtcagcgtgctcgactctggaatgattgatgaattcgatctctggggaaaggtgcattcatggctacgccacgctatagccacatcgatagtcccacagtgaacaccaacgccgtcaagaatattgcaatcttgtcagcagccattgctgcaggcgccgttgctgcgaccttggcgggtagatacttgcagccttccgcttgggaagcgctgctgaaggacacgtggatcattcagggcgtactcgtcgccgctgtggtcgcattgatctacaagctgcaaagcgacattgccgggctggccggtctaacgtccatgcagcgcatacagcttgacggcatggttaccgtgaagtcgcggcggctgtggatgcttttcttttcgattgccctgtcggcgctgctcccacgtatcgccgacgcaatgaccgcgggcatagctcagaaccgcgtaatgttctccgccaccgttttgcaattgacgacagcgctcctctgctgccgtctgccgggaatgtggcaagagctacgacggttcaccactgccatgatcgcggagaaggaacgaaaggagcgccagcaagcagaactggaacggctcgcgaaggctgcaaaggatgatgtgtaagcaagtcagatagggagccacacctatccggaaatttggttttactgatcgattcatgctgctgctcccagctcgaaggcatcaaagcggatcacctcttggcccagccattcgttgatcgcggtcatacgtgtctgcagcggcgctagttccatcgccgcccacacgtccgccgcgtcacggatcgagccaaagccaccgctgttctgcgggacgataccgagcagctgcggcggcacccgcagcgcagccagcatgtcatcacgggtcacgttcttgatcccggtaaattcgtccctggccgcgacctcgctgaccggaatcacctgcagcccgtccttcttcccgttgggcgagtgcacgaagaggttcttgaagttgcccggcccgcgcgactgccgcagtgcatcgcgcaacgcatccacgtccataccctcgggttgggggtcggtcatgtagaggatgtagccggcgtgcgaaccgttgttgtaatacttccggcggaacagcgtggccgactcgttgagcagcgcggcctgcacggccggcacccattccggaaggccgtagatctcctgatcggcatccgcctctcgcagctggaacacctcaccggcgggaaactcatgctctacccgtccggcacgcacctggaagaactcaccgggctgcacgccacggcgcacgtactgcgccagcggcacggccaggctgtgcgcggctcctgacatggcgcggcgacgctcgacataccccatgccgaaggtggtgtagtccagcgccagctgcgagaacgcctcccggctcagcagccggtgcggccggaacgtgcgcaccagcatgttgcgtttgaacgtcaggccactgtgcaggtacgggttggagcgcgtggtgcgcgacagcccttgcagatccaccggcggctcgaagtagcggccattgcgccagcattcgaggtagtcaaggaagccgcgcgattccagcaccgggctggcctcgccaaaggtgaacgcctcgatcgccggcggcgcgacgggtgcgccgtggtcggtgtcggtcatcagaaaatctccatggtgccgcgcgcagcctgtccgccttccagcggttcattctgcagcgcgtgcatgagtgcccaggccaagtcggcatggccagtggtacgcgagcgccctgcggtgtacgtcacctggcgcccgctcggggtgatggttttctggatcgccagcagcgattgcgtgaggtcggtccagccggcgtcgtactcgagccgttcgtcattgattacgtcgtaggctttcaacaccagccgcgttttcacctcgggcgagtagttgaagacagtcacgccggggaagaactggcgcaccagctgtgcaacgccggtgcccatgccggtcgcatccacgccgatgtaggtcacccaatagcgcttggtgatctgctcgatgaacgcggcctggtccttgaactccatgcccttgaactgatggcgttccagcacgcggaacttgccccctggcaccagcggcggggccaccaccacgatgcccgcgctgtcgccagtctcggccgggtcatacccgatccacacggcacggtcgccgtagggacggacggcaaacggcttgtagtcgcccgcccactcgacccagctatcgacttggcagggctgcagcatggttagcgggaatacgctggcgctgtcatccacgaactcgcacatcagcagattggcgaattcctcggcgctgtagtcgcggcgtagttcctcgatatcgaacaggtcacagccacggccggccgcatcaagaacggtcacgatctggcgccagatcgcgtcctcgcaacgccggccacccatcaggcgcgcgtggctcacatccagctggatctgctgggacaccgagcgtcccttgttgaagcgctcgccggtccagaaatcgaaggcctcatgcgccatggtggacggcgtgctgaagtaggtcttgcgccacttcttgtgcatcgccatgccgctggcgaccttgttcagctggttgaaaccgtaggtccagaagaactcgtcaaagtagaaattgccgtggtagccctgtgcagtgcgggcgttggtgcccaggaagaacagctccgcgccattggccagggtgatcgggtcgccggtcaggtcacggtccagcacctcacgcacgaagccgcgcatgtagccgaggaagatgtgcgcctggctcttggatgcgctcaggaaaatctgattgcggccggtggtcagcgcgtcgatcagcgcctcgcgggcgaagtagtaggtggcaccgatctgacgcgacttcaggatgatgcgcgtgcgttcgttgcccgcccggtaccaatcgcgctggtagtcgaaacagccatctacgaacgccgtctgcaggcgctcgatctcttcctcgctgaactcgttcttgcgagccttcttcttgggagctgcgttgcggttggccaccgccggattgaggtcggcctcgttgccaccaccctggtaccgttgaatgcgcgcctgcctctccagctggcggtgcagcagatcaatctctttgaagtcaccgccggtcttgccttccttgtggatcaggatggccaggcgtgcctccaatgcgccgccgatgcgctcgacggtgtcggcacggtcccattcgtcgcgcgccttccagctgtggaccgtcttttccttctcgccgatcagcgaggcgatgtcgcacacgcgccaccccatccagtacaggaacttggcttggcgtcgcggatcgacgtggagtttttcggctacgctggtcacgtgaacaggttgcccgccgccacgcgcgcgcgacacgaaaaacccacgtagaacagcggcttacaaactgaccgcgttgccgctacagcgccctcattcgaccatgggtcatcgcatcgagaaccgatgcgcaacgacagcagagggcgagatggccagcaaaaccaagaagcgttccgagttcttccgtgttgccgtcgaaggcgccaccaccgatgggcgagtgatcgagcgccagcagatcgcggacatcgccgaaacctacgacccggaggtgtacggcgcacgcatctggctggaacacttccgcagcacgctgccggacagcccgttccgcgcctatggcgacgtgctggcggtgaaggccgaggaagtcgaaattgccggcaagaagaagctggcgctcttcgcccaggtcgagccgaccgatgacctggtcgacatggtcaacgtgcgcaagcagaaggtctttaccagcatcgagatttccccggagttcgccgacagcggcaaggcgtacctgttcggcctggccgtgaccgactcccccgccagcctgggcaccagcatgctcgcgttctcggcccagcacccggatagcagcccgctgaaggaccgcaagcaggcaccggagaacctgttcaccgaggccaccgagacggtcatcaagttcaccgccgaggatgagtcggagggtcgccccggcccggtcgccgcgttcctttcgagcctgggcctgggcaagaaggcagcgccggcgcctgccaaggaagatcccgagttcaacgtggccgagttcgccgctcagctgctcggcgcggtgggtgaacaggatgcggccatggccaagctcggccaggacaaccgcgcactgcgcgagcaggtgcaggcgctgtccactcaggttgctggcctgcgcaagaggctggacgacaccccgcaggcattcacccagcgtccggttgttccgggtggcaaggatgtggaagccgccaacatcaccgattgctgatcggaccctctctcaacattccggagctaccccatgcgtaccgaaacccgccgcctgttcgagggctacacccagcaggttgccacgctgaacaacgtcagcggtgtggccaacaccttctctgtcgagccgaccgtgcagcagagcctcgaagcccgcatgcaggaaagcagtagcttcctgcaggcgatcaacatggtcggcgtgaacgaactgaagggccagaaggttggcgttggcatcaccggcaccattgccggccgcaccgacaccagcggcaacggcgagcgcaatccgtccgatccgacctcgctggtgtccaacacctacgagtgccagaagaccgactttgacaccgccctgccctatgcccgcctggacgcctgggcgcatcgccccgagttccagaccctgatccgcgacgcgatcatccagcgccaggcactggaccggatcatgatcggctggcacggcaccagcattgccatcaacaccgaccgcgtcgccaatccgatgctgcaggatgtgaacaagggctggctgcagaagtaccgcgagcatgcctccgagcgcgtcatgaccgaaggcgtcgatggcagcggcaagatcaaggtgggcggtaccgacgctgactacggcaacatcgatgccctggtgatggacctggtcgccaacctgatcgacccgtggcatcaggaagatccgagcctggtggtgatctgcggccgccagctggtgcacgacaagtatttcccgatcatcaaccgtgacaacgcccccaccgagaaggtcgcggccgaactgatcctgggcgccaagcgcatcggtggcctgcagccggtcatcgtgccgttcttcccggccaagtcgctgatggtgaccagcctcagcaacctgtcgctgtactggcagattgcctcgcgccgccgtcacatcatcgagcagccgaacaagaaccgcgtcgccaacttcgagtcgtccaatgatgactacgtagtggaggactatggtctgggcgcggtggccgagaacatcgagttcgggatctgaccatggccgacacccccgccagccgccatgtgaagcgtgcgctcgcctcgaaggaggcggcgcgcaccgccggcagcaacctgatggaagggaccacgatctaccagcagatgcaggtgcgcctggcttccgaccgcgcccgcctgaaacagatccagtccacgcagggcaaggctcagctcaaggctgcactgctgccgtcctatgccccgtatctggagggtgtgctttcggcggacgccggcggcaaggacgatatcgtctccacgctgatgctgtggcacttcgatgccgggctgttcgatgccggcctcgacattgcgcggtacgtcctggcccacggtctggatatgccggacacccacaagcgcacagcggcctgcgtggtggctgaggagatcgggttggccgcgctgaacgcgctcaagaccagcgccccgttcgacctgaatgtgatcgaccgggcggccacgctcaccgagggccaggacatgcccgacgaagtccgcgcccgtctgctgctggcgcgcgggcgcagcctgctggccaccgataccgaggccgcgccgctgagcgccgacgcagttgcccaggccatcgaagacctgcgcaccgcgatccagctgcatgacagctgcggcggcaaggaagacctcaagcgcgccgagcgcctgcagaagaagttcgacgccagccagtccaacgactgacgtcacaccgagcgtaccccgcgaccccgccggctcggggccgatcaccaagatctctctcccttggtgtgacgccccgaccaccggcgacctacggacacaccatgagcgccttcaccgccaacgcatcgcccgctcccaagcttgcccctgtcaacgccggcccgttctggccagagatcgacgtggacgcgctgcgcgaggccatccgggtaccgggcgatgtgctggcggcgcggctgcgcaacaccgtggtggtggccgtggcctcagtgacgcgggagctggcgttgtggcaggcccgcaaggaagcggacggctatgcggcgctcgcagacataccggcgcagcagatcgacggcgagtcggtgctgctgcagctgtaccggcgcgccgtgcagtgtggcaccgccgtggagctgcacgaacgctaccgttcctatgacgctaccgcccagggcaatcaacgcgccgacgatctgaccccgaccattgatgaactgcggcgcgatcaacgcaacgccatcagcgatctgcaagggctgcgccgggtcacggtggagttgatctgatgcgcgtccgctcgctacagggcgacaccatcgacgcgctgtgtcatcggcacctcggaaccaccgccggcatggtcgagagggtgatggcgctgaactatggaatcagcctgcatggccctgtcctgcccatgggcaccgtggtggaactgccggacgtaccgacaccctcaaccggcgcagtgatgcgtccccttgtccagctatgggattgaagatgaccgaaccaacttccacaggcagcatggccgcactggccaccggcgtcggcctcgcctcgctgcttccgggcatcgagacggacgcattcatcggcgcgttcgccggtgccaccctgttcgtcgtatcggccaaggatctgacgctctggaagcggctgatctacctggccatcagcgtggtggccggctacatgggcggtacggaggtcatgcgccggtttgacgtggcgtccagcggcctggccgcgttcctgtgcgctgccaccatcatcaccctcaccctggccctgatcgagcgcagccgcagcgccgatccgagccgcctgccgcgcggaggctccgatggctgaactactgaccaccgccacgctgctgtgctgcgtggccatctgcgtgcgcctgctgacctaccggccagcgcccaacgccaaccatcgccacggcatcgcctggtgcgcctggctgctgattgccagcaccggtgggcaggccctgcagatcatcctgcagggcgccggcgcccgcgtcaccgcgtggcagctggcactgctggtggtgctgctggtggccgtctatcgggcgcgtggaaacgtggcccacttgttcgggagcaactgacatgctaacccctgctctgctcgctcaaatcatgcagtgcccgctgcagcgcgcacagcgctgggccgaggcgctgaacgcggccatgaggcgcttcggcatcaacacgccggtgcgcgcggcctacttcctggcacaggtcggccacgagagcctgagcctgtcgcgtgtcgaagagtcgctcagctacagccgcgaacgcctgctggaagtgttcggccggtacatctcgccagccgaggccgccgggttcgttcatcagccggcaaagctcggcaaccgcgtctacgccaaccgcaacggcaacggtagcgaggccagcggcgacggctatctgttccgcggccgtggcccgctgcagcataccggccggggcaactaccgccgcatagggcagctgatcggccagccgctggaagaacagccgggcctgctgatcgagccggagatcggcgcaatggcggcggctgcgttctggaaagagaacggcctcaacacctacgccgatcagcgcgacgtgctgaccgtcagccgcgtcatcaacctgggcaacgcccgcagccgcgccacgcccaatggcatggcagaccgcaccgcccgcaccacgcgcgccctggccgcgctgggggcgcgctgatgctctaccgcgccctcgcactggccgccctggtgctggctaccgccggcctcttcagctgccagcagtcgcgcgtcagccgcgccaccatcgcgctgggcgaggccaacgcggccttggccaaggccgtcgccgacaacgccgccctggccagcagcctcaagctggccgaaggctccacccgcgtcgtgaccaagtacgtggaccgcgtacagctggtgcacgagcgcggcgacaccatcgtcaaagaggttcccatctatgtcaccgcgaaagctgatgctgcctgtgttgttcctgctggcttcgtgcagctccacgacaccgctgcgagcggcagccccaccgccggccctgccggaaatcctgatgcgcccgccgccgccactccgctctctgccgtcgccgaaaccgtcgccagcaactacgccacctgccacgccaccgccgagcaggtagtggccctgcaggaactggcccgcgagctgcacgccgagcttgaacggcaggcaggtacgccatgaagaagccgcagctgctgcgcgaccacctggtcgccgccgtcccggcactggccagcgaccccgacaagctgctgatctttgtcgacggtggcggcctggccggcacctatcggccgggtctggcgttcgagtaccgctacaccctggacctggtgctgaccgactttggcagcgcacccgaggcggtcatggtgccgctgctgcagtggctgacccgtcaccagcccgaactactggccaatcctgccaaccgtgagaagctgacctttgaggtggacgtgctgggcgacagcctggtggatctggccatcaagatgccgctcaccgaacgggtgctggtcacccgcgccgccgatggcagcatgcagctgcagcacctgcccgagccgcctgcagagggtgcccacgccgacacgctcgccggcggcgccctggtcgcagacggcgtccagatcgccaccctgccggcgatcgcgcagtgagcgaggacctacagcgactggaagcctgggccgcgcccctgctgcagcgtctgcagccggccgaacgcggcaagctggcgcgcaaagtcggtaccgcgctgcgccgggcacagcagcagcgcatcgcaacgcagaaaaaccccgatggcacaccctacgcggcgcgccgtgccgcgcccctgcgtcgggccaaggccgggcgcatcaagcgcggcgcaatgttcgtcaagatccggcaggcgcggcaccttcgcgtacgtgtgacccccaatgaggtggccgtcggcttcaccggccgcgtatcgcgcattgcactgatccatcaggagggccgcagcgatgcggtcagcaagggcggcccccgcgttacctatgcacgtcggcgcctgctgggcttctcggcagccgacgagcggcttgtgcgcgatctgatcctcgaccatctggaaggtctgtaacgtaatcccccgccctacatggcgtagccggtgggcgcgcgcgcgcgcgatgggatgctgaaacgcatccccgaatcggcgctgtcgtgtccacatttaccgccatcgaagtcgacaaactgccggcgcccgacatcttcgagcaacgctctttcgagtcgatctacgccgagcgtttggctgagttccgccgtctttgcccggagtacaccgccgtggtcgaatccgatccggtggtgaagatcctgcaggccagtgcgtaccgagaggtgctgctgcgcgagcagttcaaccagcgcgctcgcggcctccttcttccgtactcccaaggcggcgacctcgacaacctggctgtgccgtacggggttcagcgaaagctgctgacccccgccgatcccgagacgggcacaccggcggtctacgagagcgattccgatttccggcgccgcatccagctggcgccggagggtctgtcggttgccggccccgaaggtgcctacatcttccacaccctttcggccgacgtggccgtactcgacgccagcgtggccagcccttcgcccggtgaagtcgtggtgaccgtgctttcgcgggagggcgatggcacgccctccgcgcagctgctggctgcggtggaatcggccctgctcaacgggaacgtgcgccccctcaccgaccacgtgactgtggcggcagccaccattgagccgtacgaggtccgcgcgcagttgaccaccttcaacggacctgacagcgccctggtcattgccgaggccaatcgccgcatgcggctgttcctgagccagtcgcagcggctgggccgtgacgttcctctctcggcgctgtattctgccctgcatgtcgagggcgtgcagcgcgtgcagctggacagtcccgccgcagatatcacggtcagtccgcagagcgcggcgtactgcaccgctgtggtgatcgaacacgtgggcaccaatgactgaggtgcgcagcctgctgccccccaatgccaccacgctggaacgggccgtggagggcgccgatgcgcagctgatgggcatcccgatggttcaccacctgctgtggaacccgtggacgtgcccggcggactttctgccgttcctggcgtggacggtgtcggtggacacctgggacagcgagtggccggaacagatcaagcgcgcccgcatcgccagctcgttccagatccaacggcacaagggcaccgcgcagagcattgccgacgtggtggccagcttcggcggacaggtgcagctgcgcgagtggtggcagatggacccgcccggccagccccacaccttcgagctgctgctgaccctcagcggtcaaggtgggcaagacgccaccgccgactttatcgaccaggtgatggctgcggtggaccgcgccaagcccgtgcgttcgcactactccttcactcagggcatcaacgccgagggcgccatcggcgtcctgggcgtggcccgcgtgcttacctctacccgcctgcagctggccgccagcgaaccgtaggacatacccatgcccatcccccagatcaccattacgccggcaggctttgccgccatcgtcaacgcagagaacacgggtaccgcgccggtcaaggtcacacaggtcggcttgactgctcagcacttcgatgtgggcaccgtgggcgcatccgtgccagcggagttcaagcgcctgaccaccttcggtggcaaggccgttgccgacgacacgctgcacctgaacgtgcgcgacgacggtaccgacacctacacgctgcgcggctttggcctgtacctgcaggacggcacgctgtttgccgtctattcgcagtccacgcccgtcatggaaaaggcagcggccgcaaccctgttgctggccacggacattcggttcgccaagatcaacgccaccagcatcgaggtcggcgatatcgacttcatcaatccgccggcgacgaccacgcagatgggtgtagtgcggttggccaccgagcaggaggcagacgccggcagcgatcacgtcacggcgatcaccccgcgcggcctggcccgatacatcaacaaccgcttcggaaccggggcgccttccaccttcgtcaagacgctgctcggcttggccaccgctgccatgttccgcgtcgagctgggcctgaagtccgctgcgctgcgcgatgagggccatgggaacggcctcaacgcggacctgctcgacggcgcgcacggcgattactacctggactggaagaacttcaccggcgtgccgaacaggttcacgccggctccccacacgcatcccatcgacgaggtcgacggccttcagcccgcgctcgacggcaaagccaaccgtgccggagacaccttcaccgggccactggcagtgaatggggccatgctgcgttcttacggatggaacggcgtagccagtaacggaatcctggtgctgggtgataccggctcctccatcgtcaaaaacggggcctacttcgacttcaccaactcggcgggcgggtataccgccaccctttcggccggcggcaccatctggaccagcggcaactttgatcctgccaagaagctgaacaaagccggcgatacgatgacgggtgacttgaccaccgtcggtcttcgtgtcggctatcccggcaacgctgtttgccgcgtcttcagttccgccggcgtcgtctactgggacagccgcagcagctatgatggcgcgctgcccgacgccaccgcctactaccgcgctgtttcacacgaattccgcaattcgtcaggcaatcgcgttgtgcttatcaatggcagcggcgggatctacgccagtctctttgcgggggcgcaagccttcatcggtggcgaccagaacacccaagggacgcagattttctggaacgctgctggcgaaacgaacggttacggttgctctgagtacatctgcaactacggcggcggcactggcgggcaccacttctacgtcaggcctagcgcaagcgccggactcgctcgcgtgatgggtgttggccgcaacggagcgctgtggacggccggcggcttcgacttcggctcatcgcgcaaactcaaagacgttgacggcccgatgccctatggccttgcggaagtccgtcgcattgcgaccctgattggccgatacaagccggagtacaacccagacgggcgcaaacgtctgttcttcgacgcagagcagttcgccaccgtcatgccggaagctgttgatgctgagagcatcgagttcggtggcgagcgagttgcatccatgaagctggatcaggtgatgccaccggcataccgggccattgctcaactcgccgacctggtggaccaactgctcgcggaagtcgccgctctgaaggagggctgctgacatggcgagcggatatcgaagcggcggcgtggacttcgacgacctgttcgacgccgatgtgatgggcgatggcccgactgccagcggataccggcagagcgggcagcctttgcgctatgcccacatccagtacgggcagaagcgcggcgatgtgggctatcgctccggcggcgtcgacgtatcgaacctgtgggctgcaaagggcacagcaacctacgtgctgccgtttcacggcaagggcttctccgcgcacaaccagtccgacaccaacgcgcagggcaacacctcggcgcaggtggagctgcgcatcaacgccgatggcgcctacgaggtctgggtgtcgaccaacggcggcggcaataactccagccgcgtggctgagcgcgggatgtggctgcgtaacggcggcgctggcgagtacgacgtgcgctttgagttcgcaaacgccggcgcggcgaacgttggcagtacggcgccggactggcgcaatgccagcgcttcgcagtcgtgctcggcccaggtcagcgttcccagcgcttcgggccagaacgtgcgcgcggatgtggagttccactgcctcatgcgaagggccggcgggaacgtcagccgttccatcatggtggccagcgtaggcgcagccggctggtggtaaccgcagctttgtagcgcgtcgatctacgcgtgccattacgtgcgcgcgcgaggggcacggcacaacatgggcgcatggatagcgcccagccccaacagatcaacaacctgctgcgccagggagtggtgacgacggtcgatcattcgcgtgcgctgtgtcgtgtccgcacgggcgaggcccataccgactacatcccgtggctggcatccgccgccggcaccctcgcggtgtgggcgccgccgggcgtcggcgagcaggtgacgctggtgtgcagcgacggcgacttggccaatgcggtcgtcctgcgcggcctgtactgcgatcagtaccccgccccgtccgacaatgcggatctggtcatggtcaagttcagcgatggcgcggtcatcagctacgacagcgcatcacatgcgctcgcagccatcctgcccagcggtggcattgccacaatcaccgcagatggtggcgtcacgatcaacgggccggtcaccatcaacggcgataccagcatcaccggccaggtcaccatcaacggcaaggctgaggcgtccgaggacgttgtgggcggcggcatcagcctcaagcagcataagcacggcgcggtacagccgggcagcggcacgtcgggaccgccggcatgatcggcatggacggtcaggcgggcacattcaaagacgacaccgcgcatctgcggcagtccattgccgacattctcaccactccaatcggctcgcgcatccagcgccgcgattacggctcgctgctgccggagctgatcgaccagccgttcaacgaagccacgcggttgcgcctgtatggcgctactgcaacggcgctgatgcgttgggagccacgcctgcgcctcagccgcatcaccctctcgcgtggtcaggagccaggcacgttcgtactggatctggatggccagcgcacggtgcccaccggcgcctccagcaccacccgtctctctgtcccgcttcgcttccgcaccccataaccgcaggagttccctcatggccaccgactaccaccacggcgtacgcgtcatcgaaatcaacggcggcgtgcgtccgatccgcactgttgccaccgctgttgtcggcgtcgtctgcaccgcgcaggacgctgacgccacgctgttccccctcgaccgaccggtgctgctgaccgacgtgctgggcgccgtcggtaaggccggcaccagcggcacgctgcgcgccacgctgcaggccattgccgaccaggccaacgccattaccgtggtggtgcgcgtcgccgaaggttccgacgatagcgccaccaccgccaacgtgatcggcaggaaggacggcgccaccttcaccggcatgcaggcgctgctggtggctgaggcgcaggtaggcgtgcgtccgcgcatcctgggcgcacccggtctggacacccagccggtttcggccgcgctggcggtcatcgccaagaagctgcgcgcgatggcctacgtgagctgtgccgccagtgcctcggtcagcgaagccatcgcctatcgcgagcagttcagccagcgcgagctgatgctgatctatcccgacttcgtcgcgttcaacactgccgacgccaccaccagcatggcgttcgcgaccgcccgcgccctgggcctgcgcgcgatgatcgatgagcagcagggctggcacaagtcgatctccaatgtggccgtcgccggcgtgaccggcatcagccgcgacgtgcactgggacctgcaagatccggcgaccgacgctggcctgctgaacgccgccgacatcaccaccctcatcaactccaacggctacaagttctggggttcgcgaacctgcagcgacgacccgctgttcgccttcgagacggccacgcgcaccgcgcagatcctggccgacaccattgcagaggcgcagatggtctacatcgacaagcccgagcatccgtcgctcatccgcgacatgctggagagcatcaatgccaaattccgcgagctggtgaacgcgggctatgtgctgggtgcatcggcctggcacgacgaagccgccaacgagtccagccagctgaaggccggccgggtgaccatcgattacgactacacgccggtaccgccgctggagaacctggtactgaaccagcgcatcaccgaccgctacttcgccgacttcccggcccgtatcaacggctgatgccgtactgaggaaccattcccatgtccatgcccagcaagctcaagaatctcaacctgttcaatgacggcctcagctacctgggccaggtcaccgaggtcaagctgccgaccttgacccgcaagatggaggaataccgcgccggcggcatgctcggccccatcgatatcgacctcggccaggaaaagatcgaactggaatggaagtgcggcggactgatgcgcgacgtgctgcgccagtacggcgccatcgcccacaacgccgtgcagctgcgcttcgctggcgcataccagcgcgaagacagcgccgacgtggatgcggtggagatcgtcatccgcggccgccacagcgagattgaccccggcaccggcaaggtcggtgacgacaccgagttcagcgtgaagaccaccgccagctactacaagctgagcatcaacggccgtaccgagatcgaaatcgacatggtcggcatggtgttcatcgtcaacggcgtggaccagctggccggccagcgacgcgccatcggcgcctgacccacatcaccgggctgcctcagcggcccggcccacctctgccctgagagacccacgacatgactgacaaagccaccaccaccgccggcgccgaagccatcgacgccaacacggtcaccctcgactacccaatccagcgcggcgagcaggtcatcgccaccatcaagctgcgcaagcccaacgccggggagctgcgcggcatcaagctggtggacctgctgcagatcgacgtgagcgcggtggccgcgctgctgccgcgcatcaccgagccgacgctgacggctgccgacgtgaacaagctggaccctgccgacctggtcgccatcggcaccctcgtcgctggtttttttgtgccgaaggcgcagcgggaattcctcagcgcgtagaggacttcatggccgatatcgcggtgatctttccattcaccctcaccgagctatcggccctgtcgctgtttgaactgatcgaatggcgcgagcgcgcccgtgtaagaagtggagccgagccgtgatacctttcgcccatggacatagtggtcttcatcgccttggcgggcctcctgctttgcggagtcggcactctgctgacctgggcattgagcgcgctgtgccgcctgctggcggcgctggtttcctcaccgaccgacaggccctcggcgtagccggcgcagcggttgtcgtcgcatgagcggcggcaaccttcgcctgcaggtggtgctgcaggctctcgatcaggccaccgctcccttccgcaaagtcatggccggcagcaaggggctggcttcggccctgcaggcgcagcaagccaccctccggcgcctgaacagcgcccagcgcgatgtgagcgcctaccgccagcagcagcaggcgctgcgcggtacggagcagagctaccagcaggcgcaggcgcgggtggcggcgcttgcccgccagatgagggaggctggcacccccacccgcaagctgagccgcgagttcagccaggccaagacgaccgccgcccagctgagcgcccagcagaaacagcagcaggtcgagctgcagcggctgcgctcgggactggatcgggccggcatcagcacgcgccagctcggcgcgcatgagcgcaggctgcgcacggatatcgccgccgcctcgcagcagatggaacagcagcgcgctcgcctggccgcgttggacgcagcaaaggcccgtagccagaagatccacggcgccggcatgaacgcagcagcccacggtgcgggtgtcgcactggccgcgttcggtgcgctgcgcgcccaggtcctgcccatcgctcaggccatggacttcgagtcggccatggccgacgtgaagaaggtagtggacttcgatgcgccggacggcttcgagaagatgggcaacgatattcaggagctgtcgcggcgcctgccaatggtgcccaccgacatcgccaagatcgtcgccgccgccggccaggccggcatcgccagcaacgagctgacccgtttcgccgaggacgcggcgaagatgggtgttgcgttcgacaccaccgccgaagacgccggccagacgatggccacttggcgcaccgcgttccgcatgggccaggatgacgttgtcgtgctggccgacaagatcaactacctgggcaacaccggcccggccagcgtgcagaagatcagcgaagtggtgaaccgaatcggtgcccttggcgaggtcgccggcctcggtagcggcccgctggcggcgctgggcgcgacggtggccggtatgggcatcgagtcggaggtgtctgccaccggcatcaagaacatgctgctcacgctatcctcgggcgatgctgcaacgaagcggcaggtggagtcgttcaaaaagctgggcctcagctctggcgatctggcccaagccatgcagaaggacgccggcggcgccattctggatgtgttggagaagctcaagaagctgcccaaggccgagcaggccgcgaccatgacgcagctgtttggtcgcgagtccatcggcgcgatcgcgccgctgctgaccaacctcgatttgctgaaggagaactttggcaaggtcgccgatgagcagaaatacggcggttcgatgaacgccgagtacgccgcccgcgtcggcacggccgagaacggcctgatcctgctcaagaacagcgccatcgtgctgtcccagcgtatcggtaagaccctgttgcccacggtgaaggagctggctgcgcgcgtggccaaggtcgccgaccgcatggccgagtgggtcaagagcaaccctcagatggtcgctaccatcgccaagctggccatcggcggcaccgcgctggctgctgcgctcggcggtttggttgtcgcaggtggggtcggcgcgatggcgctaacgcagatccacaaggcagtgatgctgctcagcggtggcggcggcctgggcaagctgttgggccaggtgctttccttgggcggccgggcgttcccgatgctgttcaacgttggccgcatgctgctgccgctgctcggcggcatcagcctgccggtgctggccatcggcgccgccatcggcgtggtggcagcgctggtgtggaaatactgggagccgatcaaggcattcatgatcggtacctggcagggcattgttgacgtggtcaatccgatcatggctgagctggccaccgcgctcgaaccgctcggcccggtgtgggacatggtgtcctcggcgatgagccaggcgtggggctgggtgatgaagctgttcgccccgttcgaggccaccagcgagcagctgcagggcgccaccgatgccgggcgcgggttcggccagatcctgggcaccgtgctgacggtgaacctgcgcatggcggtgaaggccattggctggctggtcagcgcctttaccaccatcctgccggtgatccagaacgctgttggcggtgcgtggacgtacctgcagggcgcgtggaatctgatcgtgggcctgttcaccggcaacggcgacaagatccgctctggcctgagcgcgatgtgggcgggcgtcaatcagatcctgctcgggtggcccgcgcagatgatgcaggctggcatcgacatggtgcagggactggtcaatggcatcgtgtccaaaggcagcgcggccatggatgccgtcgccggcgtcgcttcgggcgtggtgggcaagttcaagggcatgctcggcatccacagcccctcgcgcgtgttcgcgcagttcggcgacttcaccatgcagggcctggccggcggtctcgaccgcagccagggcgagccgctgtcgcaggtggccaccctgggcgaccggatgaagcaggcaggcgcaggaatcgccctgggcgccgctgcgctgcccgtcatggccagtgctggcccggtagtggcgccgtgtgccgcgcaggccgccacgggcgccgcaggcggcaacagctacacgatccagatcacagctgcacccggtagcgatggccaggccatcgccgacctggtccgccagaccattgaaaccctcgagcgcgagcgggccagccgccgtggctcccgtctgagcgattgaggcacaccgccatgatgatgacctacggcacgtttgtgttttccctctccacagcggcctatgagcagctgcaacggcagatgacgtggcgccacgccagcagcgaccggctgggcgcacgcccggcccgtcagtacgttggcccaggcgacgacaccatcaccctgcagggcaccatcgccgccgagctggtgggcgatctgcaggtgctcgacacgctgcgggagctgggcgaccagggcaagccacaggcgctggtggagggcagtgggcgggtatatggcgcctatctgctggtcagcctgagcgagacgcgcaaggagttctttcccgacggcacgccgcggctgatcgaatttcagatgcagttggagcgcgacgacgacggcgccaccgaggcggtcgcatgagggcggcaccgtacccgatccccgcatggcgcgtggtgctggacgggcaggatctgaccgaccgcctcgcgccgcgcctgctggacctgtcgctgacggagagccggggcgacgaagccgacgaactgaatctgcggttgcacgaccatgatgggcgcgtggcgctaccgcgacgcggcgtcacgctgcaggtggccatcggctggcgcgaaagcggattgttcgataagggcacgttcgtggtcgatgacgtggagcacagcggcgctcccgatatcgtctccatccgggcgcgctcggcggatctgaccggtgctgtccgcagccgccgcgagcgcagctggcatgacgccaccctgggcgacattctcggcacaatcgccgccgagcattcgttgcgcccgtccattgccgcaaaccttgcgtccgtccgcatcccgcatcttgaccaggccaacgagagcgatatcaatctcctgacgcgcttggggaagcgttttgatgcggtggccacggtgaaagccggcgcactgatcttcgcgcccatcggtgccggcacgacagccagcggccagccgcttcccggtgtccagatcactcgcgcatccggcgatcaacaccgctacgctgtggctgaccgcgagaaatacacgggcgtgcgggcctactggggtgaccgcaaggcagcgcgtcgcaccggtgtgctggtgggcacgtcagagaacgagaagaagctgcagcctacgtatgccactgcggacgaagcgcgccagcatgctgaggcggagttcaaacggctggatcgcggcacagcccagctcagctaccgcctggcgctcggccgcgccgatatctatccagaacaaacggtgacggtgagcggcttcaaaccggaaatcgatggcaccgattggcttgtttccaaagccacccacaccgtcgacggtagtgggggctttgttaccgcgctggagcttgagcgcggtggctagttggtatcagttccgaggaggattcgattttccgcgtcaccgtagtagtagctgacgcgcaggcttttatctagtggcatgagctgcatgtagcgcctcaacttttgggcttgaaacagcccttcatcgtcatcctcctcttgctcgaagatatggaagtgaacgtacttgaccgccttttcagcgaggcttccaaagagccgcagcaccgtcccatcattcacaaactcccttatgcgctcgggcaggacagaaatagcccaagtctgaggatctccgcgaactgcccctgcgcaatacaaccgcctgtcaatcatgacatccacgcctagcgcggcaagcgcgtccgtcatacgctcacgtcggccgcgcctcggcctgaattcgccgccggcttctttcaggaagcttgcccgccggaatcgcggaagcatgcgctcttgagcttgcatttcctcagcactggcgtcagcaacgtcggccagggtggtctgagaaactgtggcgtgcagtcgtgcttttgcttcctgcaggaattcttctagatcgtacatccagaagctgtccagcttcgctagtttcttgatctctgcgcacatctctgggtgcggcccggaaatacgctcgttgtgcttgctccaccaatcgactttcttgtcttcggtgatgattactagccgcttgacagcgtcgtcatccttgaacttttcgatggtctgtatccagagaacgtagtcaccgtacatccggttgtacttcacgcccgcatgcatgaactcggcgttcttcttgttcccatcctcatgccccggccccatctggctctcgtatctgtctttcgcctgcttgtaccactcatcaagctgctgttgactgggaggcggaccgacacggtccccgatcagcgaaaccaaggaatctcgaatcgcgtccgctccacggacgtcgacttggctggcgagcgcggcgttcgcctctttgattatctcggcgccatgcgacatgagtaatgccatcttctcaactgctgagcttagcccgcgcttctccaactgtacggccttaaccgcactttcaaactgcgagagagcagcctccaacggtgcgaccgcatccaacgctctctccctggcctgtccgactgcgcgcacccggttcctgtggtactcgaccgcaacctgatacggaatccagatccgcgcacccagcttcttgagagcttctagcgtctccttcctcgtctgctcaggaagcgcataaagcttcaggagaacattcgcgtcgattacgaatattccctcacgccacagatcggcggcctccgctgaggttggctcaaaatgacctgggaacaactctttcaaacttgacatgtgatctcctatcgcacgcttctagttggttaccaaagacggcacggtcgccctttaagtcttgctgcactgccggcacttcgtaggaggaacctacggaaccactgatcccattgccggtgtagggtcgcccctaacagaagcagcactgattgagagatggatgaacaggagggaggagttagcaccaacaatgcgagacccgcttgccaagcagccaaagcaaccagggccaacgctacgagcttaggaggaacaggtcgccccggtgctcgagcatcgtccagatactcaacgtgagggcaatgcatccgcacttccccagtgaacacttggcctatcaccgccccctcaaataccgtagtgccgttgcacacacacgttggctgagcactcttcaccgcaccgctgcattccatattccttcacctcgaattccgcgccctactggcgtcctgtacgggcgagttagcggcctgaatgcgatgcggggtgagcctcagcgggcggctttcttcgatcctttctgagccttgacaacgatcttttgtccgcgcagatcaacatcgccgctgatctgctggccgatgctggtgttttcgaaggaggttcgaggcgcgcttgtggccgacgccggcgctacgccgcgcagcgcggtcatcacggcggcacgtgccgaagccgacgcactgcgccacgcatcgagcaggtcggcatcagcctcggccaggcgctcgcgcctgcccaccagcacataggtcacatcgacgccgagttcatcagcggcgacgaagtaggcaccaccgggcaggtgggcatcttgctcgaacaggatctgcgtgcgcttggcaacaccgcaggccaatcccatggcctcctgggtaagacccagccgcttccgttcttctttcaggcgaatacctacagacacgcaaattcccccttgacaggtgcagttaacttcaccaccatttcacccagaaatacacaggggaaacggaatgaacgccaaacgacggactaccgcatccaagctgcgcaccgcagagcaggcgcgccagtggcttgtcgacaacggcctgtcggttgctgccttcgcagaagccaacgggttgagccgccatgcggtgaacaacgccttgcgcatcgacagcaaatgccggatcggcaagacccacgcagccgctgtagccctcggcatgaaagccgcccctgattctcacacagattcgcccaaatccgcccggattcgcaccaccaagaccgttcggggcacggcctcggcgacggcgaaggctgtcgcgaccgcagccaagcgcagggccaaggcgtgagcgggccggtcggaaaacgcgccgtcttcacctgcgacgcctgcggcacgccgttgacgaagcgcacgagcgccttgcagcaccgtcatcttcggaccgatgcgtacgtgtgccagaaccccatgtgcggcgcgacttacacgggcatgtcggaactgaccagcatcgccagccccagcggcctgcccaatgcccccgcatgcgagctaccgccgacgcccggctatgagcgttcgttgctgcagcaacgttggcgccaggaactcggtgatgcgcagatcgactggatcgaagccaccgaatgcaatcagcaggaatgcggcgccccgcccgtctcctgatcgccatttccccttccacaaccaactgacctggcgccctacggtgccagcaagggagcgctgcgcccgtgatgcgccacaagacaaaatttgatggatggtcctcggcgatgcagccgagtttcgttaccgcgccggcaggggtcgagtacgtgcccttcgcacagaaacagcgcgacgctgccgagcttcgcgccctagtggaggctcacatcgccgccggtggcgcgtacgacgtgttgcctgcaacgactgccgcacaggtttccgcatgagcctgtccaccgcatcaaccaatctgcacatttctacacagatttacttgacttccccaaggacggggagcaggatctgcgccaaggagcttagaaactccgaggatacagcggcatccgcgcccgtcagcatcgcggtttttttgcgcctgcaaaacgagcgcaccgacgtttttctgcgtcgggaggcggcagcgatacaacacccgcaaggggaaagctgtcggccggtctgtatcccggtttctaacctcccgacttcctcggtgcggcgcttagaaacgtctcgccgaggccacaactcggatacaggagacgtctccatgcctcatggcgccccttccacgcccggcaacgctgccgcgcgtcagatttcgctcgccttcggcctcatcgccgacaccctcgaatggcccaatgaggactaccaggcgttcattgcccggctggtcggtgtgggcgtgtccccgctcgccatcaccctgggcgacgtactgatggcctacaccgcacagtgcgatgcccgtagggacgcccgtggcgctgatggtaagggggcgtactgatggcgccgcccaacaacgtgaccatccccgaaccatgcctgcgtccggtcatcgtgctggagacgccgattcctggcctcggcctgcgtgcctcgttcgaccagcacaagatcctgtttctggcgctggtacacatcgagtcggacacagcagcgacgttcaccgcgcatcactcacgcaatctgttgcggactgccgccgggggaatccagattggaaccgtcgtctacctgctggccgagggcgaggccgagcgcttcttccagtggctgcgcacgggcgagagctacccaggcggggtgaactgatggccagcagcaacgggcatacgccggtactgcccggcccggtggatcgcggcgaccaggtgatcagtcttgccgactacctgcgactgtgccgcatcgcggctgcagccgaactgctggccaagctgccgagcgaggcggcaaagatgctggatatcaaagccgatcacacgtctgccgtcgcgcagtacatggccgaagacctcgccgcgatcctgagccgatcccgccctgcagacgagtaatgcaccacccggccacgacggcgcgccaacgccgccgggggcggtcaggagagaaccatgcaacaccaccgcaccgccgctcatgcggcgaacgaaggctgagccgccatgcaagaagaaatccgccaacaggtactgtcgcgcgtccagcgcgactatggccttaagcaccgtagcggcactgagtacatgcgcgggggcaagtgccctcactgcggcaagaaggagctttacaccagctacctcaagccgtgggtgctgcgctgtggccgacaggccaagtgcgggcaagaggtgcgcgtgcgtgacctctacgatgatctgttcgacgactactcgaaaagcaacccgcagacgccacaggcgccgcatgctgcggctgacgcctacctggccaccggccgcggcttcaatgtaaagccactgcgcggcctttatacgcaggaaagctactacgaccgcacgaagcgcgagggtaccgccacggtgcggtttccgttgctcaagggcggctggtgggaacggctgatcgaccgtccgcaccgcttcggcaagcagaaggcccggtttgcgccgggcgagagctacgctggggtgtggtggggtgccgccgcacaggatcagctgcgtaccgcccgtgaggtctggatcgtggagggtatcttcgacgccatcgcgctcctgcagcgcggcatctgcgccgttgccgccatgtcgagcaacgcctatcccgaactgtccctcaaggaactgaaggccgcacgtcccaacgacctgccggtgctggtgtggggtctggacaatgagccgggcgcacgcgcctacaccatcaagcacgcccgccgggccgagaagctgggctatcgctgcttggccgcgcagatcgagcaggttggcgagaagaagaccgactggaacgatctgcacctgcgtgcgcaggcggcggaggacggcgacgcgcagtggcaggccgacctcgaccaggcgcgccacaacggcgcggtcttgatggcgcgcacggccgtggacaagggccttgtgatctaccagcgcgagcagaagacagagttccacatcgagttcgcctcgcgccttttctggttcgagttcgacgcagtgcgcttcgacaagatgatgcgtgagaagaatcccgacgacgaagaaggcacgctcagcgatgaagcggtggccaaaatccagcgcgcctgtgcgtcggtgcagcagatcgccaactgctaccccgaggcgctctacttccagcgccacgaggccaccgacgaaagctggtactacttccgcgttgacttcccgcacgacgcgccatcggtaaagggcaccttcaccggcgcccaggtagccagtgccaccgagttcaagaagcgcatcatcagccttgcccagggtgctgtgttcagcggtagcggccagcagctggaccggatgatggaagaccagctgttcaacatcaaaaaggtcgacacggtcgacttcgtcgggtacagccccgaacacaaggcgtacatcttccctgacctggccgtgcgcgccggcgaggtcaccctcgccaacgccgaggactacttcgagttcaacagcttgcgcatcaagaccacgcagcggtcgatccgcatggacatccagcgcgatcacgaaaactactccaccgactggctcggctggctctggacgtgctttggcacacacgggatcgtggccctcacgttctggttcggctcgctgtacgccaatcagatccgtagcagtcacaagtcgttcccgttcttggaagccacgggcgaggccggcgccggcaagaccacgctgctcaacttcctatggaagctgctcgcccgcgccgaccatgaaggctttgaccccgccaagtccacgaaggccgggcgcgcccgcgccatggggcagatttccggcatgcccattgtgctgctggaagccgaccgcagcgacaacggagacaaggcgcacgccaaatcgttcgagtgggacgaactgaaggactactacggcggcggcaccctggccacgcgcggtgtgcgcaacggtggcaacgaaacctacgagccgccgttccagggaaccatcgtcatcagccagaacgcgcctgttgatggcagcgaagccattctcacgcgcatcgtgaagctgcatttcaagaagccgactgcgacgaccgagagccggcaggctgcggacaatctcaatgcgctaccggttgagaagctgagctacttcctgctggcagcgctcaaggcggaaaccgccgtgatggagaagttcgccgagcgcgttcggttctacgaagccaggttgcgcgaggagaaggagctgcgcgtcgagcgcatcatcaagaaccacgcgcagatgcttgccctgctcgatgcgctacggctggtggtcaacctgccggaacacatggtgcgcgagacccgagacgccctggtcaagatggccaccgaacgtcaggacgccataggcgccgatcaccgcatcgtctccgagttctgggatgcgtacgagtacatcgagatgcaggccagtggcgacaggcgaaccgtgctgaaccactcgcgcgacgacacccgcatcgccataaacctcaacgagttcattcagaaggcgggctactacggccagcaggtgcctgacattggcgacctgcgccgactgctggttgagtccaagcgtcacaagttcgtgagcgccaacaccgccgtcaacagcgcgattcgttccaccccgatgctcagcagcaccgtgaaatgttgggtgttccagaagtaagacccgcagcaacagcaaaggcccggcggggagtgcgccaacaccgcccccaaggccatccaccaacgaagttcaggagagaaccatgcaacagatgacaggccaagccatgaccaccctcgcaaagtcgctggattccagcaccggacccggagcggaggctatcacgggtgtgcataactgtgtgaatgctgcggtagacggtgatgccgacgccagcgctacggtcaccctccatatcacccacaaccgcgtcatcgccacggcgatgctgaacatgggaccggccaagatcgcgcagtgcgtgttcgagcgccgcaggggcagcaggaagggctgggagctggtgaagggaagcgacttcaacgacgagaccagctggatttcgcccgagcttgccgacctggccaaccgcattccattcccctacgaagtggccaacatgctgcccggcaagcgggcaaccgccgctgccgtggcgcaggctgcgcaggaggtggccaatggctgatttcgtcgccctgctggccatgtgcgtgctgctgccggttgccggcgccaccatgctcaagatgtggcagacgcgcccgcctcggcgccgtcatagcggcttggccgtgggccagatcccgcagccgctgcgccgccgtgcccccatggctgtgcgacgggaggtggcccatggctgatatcgacgccgcccgccgattcctcgccgctgagttcgcgagcgcgggtctgcctcacgtcgccgccggcatcttggccggtaccagccccttcgcccagggtacgtacatcgtcgccgtggcgtccgcgctggccgcaccctgtgtggtttgtgacggcgctcgggaggccgcatgacacagcgacagaagacgccactgcgcaccctccccgcttgcccggataaccacccggcgcggtacatccacgatctacgtcgcgagggcgcgggcggtggccatctcatcgaatgccgttgcagtaccacggcgaagcacccaacgttcgacttggcgtgggcgcactggcacaagcaacacggcctgcagccgatccccgcggcagtggaggaacccttgccgaacaacgtgttacagatgaaattgttcgccgctgccagaggttgagcatggcgcagatcctacacttcacagacttgcagcggatctgcgctcccgacggcccacccccaagggccgtaaccgtccgccgctgggcagacagggaaggcatccgctacaaatacgaccgccgaggcggaatctggaccaccctcgacgcggtgaacgccgcgctggggttgatcgatccgcagcccgaagacgtaagggaagaggacaacatctgatgacacgcggcagaaaaaggaagttcaacccggccatacctgggcacatcgagcaggacgcattgccgaaggggatctactggcacgacgaccgctggttcgtctacgaagatcacgcggagggtggccggcgcataaagcgtacggtcgcccacgccagcgcccgtctgtccgatttgcacgccatcgtggaagagatgcgcacaggcgtagggcgcggcacgctacgctttctcttcgaccgctaccacgaatcgagcgatttcaaacgactcgccgccggcacccgcaggaactacctgggctacgccgatgtgttggcgaactacgttcgaaaggatgggaccctgctgggatctatccaggtcgaacgcatcacaacacctgtcgtgcaacggctggtggagacgtttgctgcgggccgcccagcgaatcggacccagcccgccttacccgcgtaccccagcaaggccaatcatttgcaccgttacctacggctcaccctttcgtggggtgtacgaatgggctactgcaagaccaaccctgccaaaggcgtacgccaggcaaaagaacgcggcgacgcacgcatgccgtcgcaggaagcttttcgcgcagtgctggcgttcgcgcgcgaacggggcgcgcttcccgccaatgccaagggcagctttcccgactacctggccccggtgatgatcctggcctacagcgtccgcctacgcggcatcgaggtctgcacactgactgacgcgcaccgccaggtcgagggggtgcatagcaatcgccgcaaagggtcgcgtgacaacgtaacggaatgggatgaggcgatgatcgaggcgtgggatcagctgctggcgcgacgccaccgcatctggaaccggaagggccgcgtgcgccctgttccgctgcgcgctagcgacaggttcttgctggtagagcgaggtggcgatcccatcaccaaatctgccctcgacagtgcttggcagcgcttcattaccgaggcgattcgcgtcgaggtgatctccaagagcgagcgcttcgcactgcacgggctcaaacaccggggcatcacggacggggacaacaaggctgcaggcggccacgttaccgaaacgatgcggcagcgctacgaccatgaactgccggtcgttcaaccgcccggcaggaggaacgcacttgagcgtggaaccccttaatttttccggcaatttttccggagatacgaaaaaggcgccacaagggcgcctaagtcgttgatgcaattggtgggccgtgaaggattcgaaccttcgaccaaaagattaaaagtcttctgctctaccgactgagctaacggcccgatgcatcgcccggcctttcggcggggtccgcattctaccctactttgccgggtcgcgcgaagtacaggggtgttgcgtgtgccggccagcggccggcactacccggtcgggtcagcccgcttaaaccttccgggccttccacgcatcccacccatgttcaccacccggagccacggatgcgcttttccagctatctgatcgccatcctgctgttgccctgcacagcagtggcctcgccgtcccaggtcgtcactgacgacatcgcccgcttctgggccacctatgacgcggtgcgcgccgagcctgatgccgaacgccacgtggtgctggtccagcaacgctacatcgatcccggcagccccggactgcatgcactgatgcaggtccgcaactacacggcccgcgaatacgccgaggccatgcagtcatggccacgcttctggacttcggtacggccgttgactgcgaacgcgcagcaggccagcgccacgctggaccgggacctggacgcgttccgcgcgctctaccctgcactacgtccggccaccatcacctacgcgatgggcgtgctgcgtacgggcggcaccacgttgggcgacaaggtgttgatcggggcggagatggcgctgggcgatgagcgcgtggacgtaagcgagctgcccgcgccgatgcgcggccgcctgcggatcttctacgacagccgccccggtgcgaacaacgcgcagaacaacctgcacgagtacgtgcatacccagcagcgcgagaccaccggcagcctggcccagtacgcagtacgcgaaggcgtagccgaatacgtggcagagcgcatcagcggtcgccgtccggcactgccgctgtacgcctatgggcccgcgcacgaggcacaaatccgcacgcgcttccttgccgagatgcacggtgacagcctggacaactggctgtacaacagcgcgcgcaatccgttcggggtgagtgatctgggctactacgccggataccgcatcgcgcaggagtacatgcgccaacagaccgacgagggggccgccatcgcgcggatgatcgaactggactacgccgatccggacgcggtgcgcggcttcatcgaggcatcgggatggttgcaggcccggtaggtcaaggagtgcgaaccaacggttcgcacccaccgagaggggggggcgcacccaccgagaggggcggcttgcacacaccaagaaggggcggttcgcacctgcagtgaagccggccagcggccggctctaccagacgcggtcaggcgtacagcgtggggtcgggcacgccggcctcggcaaagccctgcgcgcgcaggcggcaggcatcgcaatgaccgcaggcggcgccgtgagcgtcggcgttgtagcaggacacggtcaggccgaagtccacgcccaggcacacgccttcgctgacgatctggcccttgctgaggaactgcagcggtgcgtgcaccttgatgcccgcaccttccacgcccgacttggtggccaggttggccagcgcctggaacgccgccacgaactcggggcggcagtccgggtagccggagtaatccacggcgttgacgccgcagaagatgtcgttggcgccaagcacttcggcccagcccagggccagcgacagcatgatggtgttgcgcgccggcacataggtgaccggaatgccggcaccgccggcctccggcacgtcgatgtcgtcggtcagtgccgagccgccgatgctgcgcaggtccacgtccacggtcttgtgcgcgaccacgccctgggccttggccacgcgggcggcagcgtccagttcggaggtatggcgctggccatagcgcacgctcagggcatgcacggcgaagccctgttcctgggccatggcgatgacggcggctgaatccatgccgccggagagaagcacgactgccttcttcatgggaaaaacatccggttgggaggggaaagccagcacgctgtcccgcgccggagttacatcagggaacgctgcgccggctcatcggcccggctcgtcgttccacaggattttatgcaactgcatctggaagcgcaccggcagccggtcttcgacaatccagtcggccagctgccgcgcggtgatctcgcccttgctgggcgagaagaacacggtgcagcgctgcaccaggccgtgcccggcgaccatcgccttggcccagtcgtagtcctcgcggttgcagatgacgaacttgatctggtcgcgggcggtcagcagcgacaggttttccaggcggttgcgggcggcttcggccgaacccggcgtcttgatgtcgacgacgcgcgacacccgcgggtccaccgcgctgacgtccagcgcaccggaggtttccagcgagacgtccatgccggcatcgcacagcttttccaacagcaccaggcagcgcttctgcgccaacggctcgccaccggtcacgcacacgtggcgcacgccctgggccagcacctcggccacgatgtcgtcgatatcccaccaggtgccgccgtggaaggcataggcggtgtcgcagtactggcaacgcagcgggcagccggtcaggcgcacgaacacggttggccagccggcggtatcggcttcgccctgcagcgaggtgaagatctcggtgatcttcaggcgtggcaggggcgactgcacgatctcactgggcgtggcggcggcgctggacggagtaacggcggtcatggcgggtacttcttggtgggacacgtggcgggtgggctaccgtggccggtaacgaacgcagccgagcatggctcggctctacgaaaacaaccgggcagacagggcccggcgctgccggatccgggcgggtttgccgaaccggaaacgaaagcagccgagcgtgggctcggctctacagggcacctattgtacgccgggtcagcggatcagcggatctgcttgccgaggcggatggactgcagacggtcctgcgcggtgcgcgcggcgtccgagccggggtactgcgccacgacggcctccagcgtctgctgggcctggtcgaccttgccctcgccatactgcgagagaccgaccttgagcaggccgccggcggccttgtcgtgggtcggatagcgcgagagcagttctcggaactgggtctcggccatcgggaagttgcgggtggcgtagtagctctcgcccagccagtacagcgcgttcggcgcgtagacgccgttcgggtacagctgcaggaagctcaggaacaactgcgccgaatcatcgtacttgccggccttcagcgaatcgaaggcgacgttgtaggaggtgcgctcgtcgccggtggcggcaagactgccggcatcaccgtggacggaaggcggccgctcggaagtggccgccgctgcgggttttgccggggccggtgcggccttcggcgcgctcgccggaacgggcggcagggccggggcggcattgcccccttccaaccggttcaggcggctgtccagatccaggtactggtcctgggcggactgcttgagctgggcgttgtcgtgctgcaactgctcgatcgaggcctgcaggctggtgacctgctgccgcagctgattgatctggttcaacaggtcctggttggcgctgttgttgtacatctgctgctcgagcgcgccgacacggtcggccaggctctgtcgctgtgcatgcgccggtgcggcagccacgagggctgccgcaacgaccagcatcagtttgatgccagtgcgcatggattactgcgcggtgtagacgatttcgacgcgacggttctgcgaccagcaggactcgttcgactcggtgcagaccggacgctcttcaccgtaggacacgacggtcagctgcgaagccgagccaccgttggcctgcagggccgagttgacgccgttgccacgacgctcacccagggcctggttgtacgcgcgcgaaccgcgttcgtcggtgtggccctgcagggtgatgcgcgaggacggacggtcacgcaggtacttggcgtggcaagccatgatggcctggaattccggcttcacgtcttccttgtccaggtcgaagtagacaacgcgctggcgcaggcaagcgtcggtgtccaggtcgcccgggccgtacaggccggaggtcgacggaccggtcggggtggtggtggaggtgccggtgtcgaccggggttgccggctcttccttcaccttcttcgagcaaccggccaggacggccacagacagcagggaaacaagcagaacgcgggtggacttgttcatggcgatacctttgtggctcctaggccgatgaggggttcaagacagcgaaaatattaacactcttttagcgctgggtacggtatggggaccatgccggttcgcgcacatctccgtcagccagaaccaaccgctggcgcacgcgcgcatcggcggaaacggcgtacagcacaccacggccaccctcgcgggcggcgtacaacaccatgcttgcgttgggcgcaaagctcggagattcatccagcgaacccggggacagcgtgctccagcggggcgaacccagcgagctgtccatcatcgcgatcttgtagctgttgcccgagccctgcgcaacggcgatcttcttgccgtcgtaggacaccgagggcttggcattgtagttgccctggaaggtcacgcgctcggcactgccgccacctgcgccgaccttgtagacctgcgggcggccgccgcggtcggaggtgaagtacaccgcgctgccatccggcgcccaggtcggctcggtgtcgatggcgaagtggttggtcagctgggtcagctgcttgctgcccaggtccatcacgtagatttccgggttgcccgaacgcgacagggtcagggccagcttgcggccatccggcgagaacgccggggcgctgttgatgccgcggaagctggtgaccagttcgcgcgcaccggtgccgatgttctggatgtagatcgccgaattgccacgctcgaagctgacgtaggccagcttgctgccatccgggctccacgacggcgacagcagcggctcggccgaacgcacgatggtctgcgggttgtagccgtcggagtcggccaccatcagcgcatagcgcatggcatcgcccttgccgctggcggtcacgtaggcgatgcgggtccagaaggcgccgcgcacgccggtgatcttctcgtagatggcgtcggccatctggtgggcgacgtcgcgcatggcgttgccacgggcggtcatcgccaggcccagcaggcgctcgcccttgggcacgtcgaacagttcgtactcgacgcggtaggcaccagcaccggcatcgagcacgcggccgaccacgatgtagttctgcttcagcgcgcgccaggtggcgaactggatgtcaccgccacgcacgggcttctcgacgatctgcgcttccggcagcgtgcggaactggcccgaacgctccaggtcggcgcggaccacgccggcgacgtcggtctgcggagcggccgacgaaccctggtagggcatcggcacgatggtgatcggcagggcggaggcattgccgccgatgatgtcgatatccagccccttctgctgcgcgacggcagcaaagggcagcaacagggccgcaaacacggcaagccagcgaggcatctttttcatggagcgctcaatagggggaaaccggaacgagggataacaaagcgggagtgaaccgcttcgcaatcatgaaccaagggtacgtgaattccgggtcagttccagcccgtcctctcacgcaccgttaacgtcgtggctaacatcgcacctgcctgccccggtcacgccgcccagcggggcggtgttcgacagcagcctgcagcctgcccggtcgaaaccgagcacgccagaggcaagcgcgacatccgtgggcaggagtggcccgaggccacccctgccctgcccgcctcagcgatcctgggcggtaaaggtgaagttgagcgtacgcgcgaacaccgactcgaagccgcggtacggcagtggctgcgcattgagcaccgcggcctcgatcgaacgcttgccggcctcgtcataggggcagttcgggctgaccttggcctgcatcaccgtgccgcccggaatctgggtgatggtgatctggcaacgctggcccagcggcaccgtatccgggcgcacccactgcgacagcaccttggcctggatcgctgcggcgtacttggctgaaagatcgtcgctgttgccaccaccaccggccgccggctgggaagcgccgctggagccggcagcggcactgccggcagcattgcgcgcggcggcgacctcgcgcagcttccgctcggccagcttggcttccttctcggcctgctcgcggcgggcacggatctcggcgatcttcttctgcttctcggcctcggccttgtcagccgcgacacgctcctgctcggcctgcttcttcttctcgtccgcttcctgctgcttggccaggcgcagcttctgctccgcttcttcctggcgcttgcgttcggtcaggtcgatctgctcctggcggcgcttggcttcctgttcctgcttggccttctcctgcgagatggccagtgcgctcaccgcttcctggtccttggtgtccggctgcgcaacacgctcctgcgcctgttgctgctggggcgtgggcgcgtcctgcgggcgcggctcgggaatcggctgcggtggcggaatggtgtcttccggcaccgggatcggctcggcgaccggcggcggcaggtcctccagcttctccgactggcgcagcgcctggcgtgcggcggacgcctcggaggcggacagcgccaggctggcctcgaccgaggggtcgccagcggcggcatcggtgttgcgctggggcgaccacagccaggccacgatgaagaccagcgcgaccagcaggtgcaccagcaacgccagcgccaggggcagaccccagccgggttcgcgctgatgcgggggtggcagggcgtcagcgtgcatcggtggccaggcctaccttgtctaccttggcgcgcttgatcacgtccatcgcggcaatgaccttctcataggccacggcgcggtcggcggcgacgatcacgcgcacgcccttgtcctgggcggcgatgccggccaggcggccttccagttcctcggccgacacggcggccggctccttggcgtcgggcagcttcaggctgagctggccgtcctggcgcaccgagacgatcacagggtcctgcttgctctccagcgccttggcgttggactgcggcaggtcgacgtcgaagctcagggtgagcagcggtgcggtgaccatgaagatgatcagcagcaccagcatgacgtcgatgtagggaacgacgttgatttccgatttcagcttgcggcgcttgcggcgaccgatggcagcggacatggcttggactcccgggtcaggcgcttactcgtcgccagcgctctggcgctgcaggatggagctgaactcttcggcgaaggtctcgaaccgcaccgacatgcgctccacgcgggtggtgaagcggttgtaggcccacaccgccgggatcgccacgaacaggccgatggcggtggcgaacagtgcctcggagatgcccggcgcgacggcggcgataccggcctgggcaccgctgctgatcatgtcgtgcatggtcaccatgatgccgaacacggtaccgaccaggcccacgtacggggcagtcgagccgatgttggccagcagctccaggttgcgctcgagctggtccacttcgcgggtataggtggtgcgcatcgcgcgctgcgcgccttcaagctgcgcacggccatccagccggcgcttgtcgcgcaggcgggtgtactcgcggaaaccggcttcgaagatggcttccaggccggtcacgctgcggctgcggtcggtggctgcgctgtacagcttgcccaggtcggcgccggaccagaaacggttctcgaactcgtcggcttcgcgggtggcctgcttgaacacgcgggccttgcggaaaatgatcacccagctgacgaacgagccgaccagcagcagcagcacgatgatcttcaccggcaggctggccttggccatcagttcgaggtagttgatgccgccgccggtggtggcctgggcaagggtctgtgtcgcggcgttgctgacgtcggccggcagtgcctcggtgaccgtggcctgcagggccaggagcgttgcgatcatccgttgttcctcaatgttcggattcggggtggaggtggggttgcagcacggcaaggacggcatcgtccatgccacgcgggcggaaactggccgcttccagtgcggcgatgcggacctgcgcggacagcagcagctcgccgtcgcgcaggatctgctggtcgaagaccatgctggccttcttcagctggaccaggcgggcagtcacctgcagggtgtcatccagccgtgccggcctgatgaaatccatctgcatcgagcgcaccgcgaagaccatcccgtgctcggcgcgcatgcgctcctggccgtagccgagcgcacgcatccattcggtccgggcccgttccatgaaggccacgtagcgggcgtggtagaccacgccacctgcgtcggtatcttcccagtaaatgcgtgtcggccaactgaatcggggctcaaccgacatcgggaacctccgcgaacaggtcctgcggcgggttcttcggcttcaggcccatgtgccggtaagccttgtgggtggccatgcggccgcgcgcggtacgcaccaggaagccctgctggatcaggtacggctcgaccacgtcttccagcgtgccgcgctcttcggacagcgccgcggccagcgattcgatgccgaccgggccgccgtcgaagtagtcgaccagggtcttgagcaggcgccggtcgagctcgtcgaagccctccggatcgaccttgagcatcttcatcgccgcctgcgccacggcctcgtcgatgtggccgccggccttcacctgcgcgtagtcgcgcacgcggcgcagcaggcgattggcgatacgcggggtgccgcgcgcgcgccgcgcgatctcgccggcgccatcggcggtgcagtcgatgccgaggatggtggccgaacggcgcacgatccgggtcagctcttcgacgctgtagaactccaggcgctggacgatgccgaagcggtcgcgcagcggcgcggtcagcaggccggcgcgggtggtggcaccaatcagggtgaatggcggcaggtcgatcttgatcgaacgggcggcgggaccctcgccgatcatgatgtcgatctggaagtcctccatcgccgggtacagcacttcctcgaccaccggcgacaggcggtggatctcatccacgaacagcacgtcgtgcggctggaggttggtcagcagcgcagcgaggtcgccggccttctcgatcaccgggccggaggtcacgcgcagggccacgcccagttcgttggcgatgacgtggctgagggtggtcttgcccaggccgggcgggccgaagatcagcacgtggtccagcgcatcgccacgcgccttggccgcttcgatgtagatctccagctgctcgcgcaccggggcctggccgaggtagtcggccaagcgcctggggcggatgctggcgtcggcggcgtcatcctcgcgggtggcgccggcgccgatgatgcggtcgtcggtcatgtgctgattatgcggcaaaagcgtatggggtcggatccgtttcccagaggaaaacggctctgaccccgaaccggaacaccgggaacatggggtcagagcccttttcctacggaaaagggatccgaccccgcgcgcgtcagatctcgacctgggccccgagttcgaccaggcggttgcccggaatccggaagaagccggtggccggggcggcgttgcgatgcattagcgcgaacagcttgtcacgccagatcggcatgccgcggttggcggtggcgacgatggtctcgcgactggcgaagaaggtggtgtccatcggatcaaaatagatgccaccgtggtcgcacgagcgcatcagcgccagcggcacgtccggggtctccatgaagccgaagcgcacgtagacgcggtagaactcgtcacccaccgattcgatcttcagccgctgcccttccatcgcatacgggatcggcagggtttccacgtgcaggaacacgttgcgctcgtgcagcaccttgttgtgcttgaggttgtgcatcagcgcatgcggcgccacggtcgggtcggcggtgaggaacaccgcggtgcccggcacgcgcaccggcggggccagcatcaggcccggcaggaaggtatccaggcggatgccgtccttgcggatctcatcgcgcagcagctcgcggccacggcgccaggtgcgcatcatggtgaacaggaagatgcccagcaccaccgggaaccaggcgccctgcagcagcttggcgccgttggcgatgacgaagccgaggtcgatgatgaagaacaccacgcacagcggcagcagccagccacgcgacttcggccacaacgtccgcgccaccacggccagcagcagggtgtcgatcagcatcgtggccgacaccgaaatgccgtacgccacggccaggttggacgaactgcggaacgccagcaccagcccgaacaccatcaccgcaatgccccagttgatgcccgggatgtagatctggccgatggtgtcgtgcgaggtgtgcttgatgcgcatgcgcgggatgtagcccagctgcatggcctggcgcgagaccgagaatgcgccggtgatgaccgactgcgaggcgatcaccgccgccatggtggccaggatgatcatcgggtacagcgcccacgacggcactgcctcgaagaacgggttcttcagggcctcggggtggttgagcaccagtgcgccctgccccaggtagttcagcaccaggcacggcagcacgaagaagtaccaggcgtggcggatcgggcgcagcccgaagtggcccatgtccgcatacagcgcttcgccgccggtcaccgccagcaccactgcaccgagaatgaagatgccgtgccagccgtgctccatgaagaagcggatgccccaccaggggttgaaggccttcagcacctcgggcgcatcgacgatgttgtagatgccgattgccgccagcgacacgaaccagattgccatgatcgggccgaacgccttgccgatcttctcggtaccgaagcgttgcgcggcgaacaccgccagcagcaccaccagggtgaccggcacgatgaagacatgaagtccgggcgcggccacctccaggccttcgaccgcactgagcacggacatggccggggtgatcacgccgtcgccgaagaacagcgaggcgccgaagatgccgaggatgcccaccacataagccgagcgcgagccgttgcgcagcgtgcgttgggtcaacgccatcagcgccatgatgccgccttcgccatcgttgtcggcgcgcatgatgatggtgacgtacttcagggtcaccaccaggttcagcgcccagaacgccagcgacagcacgcccagcacggtgtcgtggtcgctgttgagcccgtagtgtggcgagaacgcttccttcagggtgtacagcgggctggtaccgatatcgccgaacaccacgccgatcgcaccgatgaccagcgccagtcctccagcggagggggcgtggccatggccgccgggggcggctgcgtgcggggtttgactgctggacatgggactcctggcgaagctcaggcggtaggttgggggaaagggacgcggttcagcgcagcgcggactgcagcgccttgcggatcacggtggccacttcgtcgccttcattgaaggcatcgcgggccatgcgggccgcttcggccggcttgtagcccagctgctgcagggccacggtggcatcggacagcggatcggccggggccggaccactgccggtgggcagcgcgccgccggcaccgaactgggccgcgcggtcacgcagttccagcaccatgcgttcggcggtcttcttgcctatacccgggatgcgggtcagcgcggtgatgtcgccggcctggaccatgcgtgcgaattcttcgacgctgacaccggacagcacggccagcgcgatcttcgcgccgatgccgctgaccttctgcacgtcgcggaacaggcgccgctcgccctcgcgcaggaagccgtacagcgagacgctgtcttccttctgcgagtaatgggtgtacagggtgacctcgcggccgagctcgggcaggtcgtagaaggtgctcatcggcgcctccagttcgtagcccactccgttcacgtccaccaccagccacggcggcgccttgtaggcgacgatgccgcgcagtcgaccgatcattgcgtgcagctcctcatttgcggccccacgcctggcgggcactgagccccaggcggttggccgtcgcccttacgtgggcatgggtgatcgccaccgccaacgcgtcggccgcgtcggcctgcagcttggttttcaggttgagcatgagcccgaccatgtgttgaacctgttgcttttcggcaccaccgcgcccgaccaccgcgagcttgatctcgctggcggcgtattcgtgcaccggcaggtcgcgcagcaccacggccgagatcgccgcgccgcgggcctggcccagcttcagcgccgaatcgggattgcgcgccatgaacaccttttcgatggccacttcattgggctggtactcgcggcacagatcggccaggcccagcaccagcagtttcatgcgctgcgggaagtcgtcggcgcccagcagcaccagcggctggtggtgcacgtaactgacgcggccggcggcgtcgacatcgatgatgccgaccccggtccgctgcgaaccggggtcgatgccgaggatgcgggtcatgccgcgctcctggcggggcggaacggggggcgctggcaggcgtatgggctcatgactgtccgcggtgaccgttcaacggcccgcgcccaggccgtcgaggacggctcaggcgtaggcgtcggcgccgagttcggcgttggaatacacgtcctgcacgtcgtccaggtcttcgagcatgtccagcagcttcttgacctgcagggcgacctcgccttcgaccttgatgtcgttgtcggcgcggaaggtgatctcggcgtggtcggcgacatgcccggcggcgaccattgcgtccttgactgcgttgaacgcgtcagggctggtgaccacgtcgatcgagccgtcatccgggtagaccacgatgtcgtcggcgccggcctcgatggctgcttcggtgatggcttcctcgtcggcacccggggcgaagctgagcacgcccaggcgcttgaacatgaaggccaccgagccttcggtgcccatgttgccgccgcacttgctgaacgcatggcggacgtcggccacggtgcgcacgcggttgtcggtcaggcagtcgacgatcacggccacgccacccggggcatagccttcgtagcggatttcctcgtaatcgacgccttccagttcaccggtggccttcttgatggcgcgctcgatcacgtccttggacatgttcacggccaggcccttgtccaccgccacgcgcaggcgcgggttgttgttggggtcgcctccaccgccgcgcgcggcaacgccgatctcgcggatgatcttggtgaaaatcttgccgcgcttcgcgtcggacgcgttcttgcgggcttcgatggaggggcctctacccatgggtgctaccgtctggctgcttcaggatcaaggcgcggattctacctgatcgggcgctgcaaccgtgtctaggcccgtattgttgtagcgccgggccaatgctcggctcaatgggcccgacggaatgcagccgagcatgggctcggcgctacaaggcggccccgcctcccctgcccctatgccgccgccgcgtcgcggctgtggtcgaagtggccgtggcgcaggaaatgcgcggtctgccgcgcggcgtcgggcgacaccaccaggccgctgtggctggtacgcaccacgcaatggtcggccaggcccggcaggcgggtctcggccagtgccacggtgccgtcggacgcatcgtcgatcgcgcccagcaggctgcccagcccgtgcggtaccgaaccggcgatcaggccaacctcggccttgccctgccagtccggcaggccgtccagcagcagctcgctgctgcgccccagcgccaggccccagccatgatcggacaatgagcgcgcggtaccactgccgcgcagcggcgagcccaggcagaccacgcgctgcactggcagctgcggatcgcggcgcagcgcctccagtgccagcagtccgcccaggctgtgaccgaccagcgacaacggcccggcgtcggccagacgttccagcaactgcggcactgccacatcggggccaccgaacaccgagggatagccgaacgcgtgtacctggaaaccacgcgcgcgcaggcgccaggccagtggcccgacccaggcgcgggcattccagatgccatgcagcagcaatacggggggagtcatgcaaacagcctggcggtcagcggggcaggaacgtgaggtgattgaacacgcgcgcgcggcaagcggcggtgaacgtcaggccgcgcgcggcgcgcggcgcaggatgaattcgaggtcctgggtgtcgccgacagggaacaggtactcgccggccttctcgaagccgtagcgggcgtagaagcgctgcgcgccgaagttctccgaccacacgcccagccacaacgtgcgcgggccttcgtgttccagccaggccagcgcggtttccagcaggcggctgccccagccgcagctctgctgcgtcttgaccaggtacaggcgcttgagttcgccgtcaccaggtttcacatccggatgcggcaggccacaggggccggcggcggcatggccgaccgcctccccatccagttccagcagccacaccgcgtaatcggggtgggacaggatcacgcgctggcgctcgaccgtgtaggcctcctcgaggaaggcctgcaggtcctgcggcgggtacagatggccgaaggtttcagtgaacgtgcgtgcggccagcgccgacagggtcggcgcgtcgtccacagtggcgcggcggatcgaatacatgcaggaagttgacgtcagggcgaagcgcgggtcaagcctttccaggcgattccgcttcttcttcctcgtcctcttcctcgtattcctcttcgtcctcgtcctcttcttcctcgccttcctcgtcctcgtcgtactcttcttcctcttcgtcgtcctcgtagtcctcgacgccgaagtcttcaccgtcccaacgaccttcgccgtcggcgacgaaggtcagggccatcgcggccggattggtaccgacgcggaccagccaacccccgaacacgcgtgcacgctcggtgaccagggtggcctcggagccttcattgcccagcttttcccactccagcgaaaacgcaaactcggtcattgcctggatctcctgatcagttggtcttggggcgaacctggatgtgcacttcggccagctgcgcgtcgacgatcggcgacggcgcgtcggtcatcagatcctgtgcaccggtggtcttcgggaacgggatgacgtcgcggatcgactcggttccggccatcagcgcggcgatgcggtcgatgccgaaggcgatgccaccgtgcggcggcgcgccgtagttcagcgcgtcgagcaggaagccgaacttggcgcgggcctcttcggcgccgatgcccagcagctcgaacaccgcgctctgcatgtccggacggtggatacggatcgaaccgccgccgatttcattgccgttgagcaccatgtcgtaaccgcgcgagacggcggtacgggcattggcgcgcaggtcggcgatgtcgtccacggccggtgcggtgaaggggtgatgcagggcgacgtagcgctgttcttcctcgtcccactcgaacatcgggaagtcggtgacccacagcggtgcccagccgtcggcgaccaggccaaagtccttgccggccttcaggcgcagcgcgcccatgaagtcggagaccttgttgtagccaccggcaccgaagaacacgatatcgccgttgccggcaccgacatgggccaccagcgccgcgaagcgctcttcgctgaagaacttctggatcggcgagctgacttcgccgttgtcggcgatcttgatgtaggccaggcccttggcgccgtacttggcggcatgcgcggcgtactcgtcgatctgcttgcggctcagcgccgcgccgcccgggatgcgcagcgcggcgacgcggccttcggcatcgttggccgggccggtgaacacggggaactcgctgtccctgaccagttcagccacgtcgaccagttccagcgcgatgcgcagatccggcttgtccgaaccatagcgacgcatcgcctcggcccaggtcatgcgcgggaagctggcatccagctcgacatcgaccacttccttgaagatggcgcggatcatgtcctcgacgaagtcctgcacatcgcgttcgcggacgaaggcgaactccatgtccagctgggtgaattccagctggcggtcggcacgcagggcctcgtcgcgaaagcagcgcgcgatctggtagtagcggtcgaacccggccaccatcaggatctgcttgaacagctgcgggctctgcggcagggcgtagaactcgcccggatgcatgcgcgccggcaccaggaagtcgcgcgcgccttccggagtggccttggtcaggatcggggtctcgatgtcctggaagcccttttcgtccaggtggcggcgcagcgcctgcaccagcttgatgcgggtgcgctgcatgcgctgcatttcggggcggcgcaggtccaggtagcggtacttcaggcgggtttcctcgcccgggttctcgtgggcgtggaacggcagcggggcggccttgttcagcacggtgatggcggtggcgatcacttccaccttgccggtgcgcatcttgtcgttcaccgcgtggcgggcgcgcacgacgccctccacctgcagcacgtcctcatagcccagcgacgcggccacggcgaacacgtcggcgttgtcgacctccacggtcacctgcacgatgccttcatgatcgcggagatcgatgaagcagacgccgccctggttacgggccacgtcggtccagccggcgagggtgacagtctggccaatcagggtctcgtcgaccaggccgcagaagtgggtacgcatggggggaagctccgctggagaacgccggcaccggatgggggccggaaagcctcgtattctgcggccgaggccccggccggggcaaatccgggcagtcacgccggcttgatcgccccggtccctatagtcgggcacctgccaccgtatgggatgccgccatgaaatcgttgtccctggccagcctggccgtgaccctgagcactctggccgtgctcgccctgccccctgctccggccgctgcgcaggacggggtgatccgctgcgaaagccagaacaaccgtgaacgtgtctgcagcaccggctggcgcaatgcgcagctggtccgccagctgtccggcagcgcctgcgacgagggccgcacctggggcagccgcaacggcagcatctgggtcagcaatggctgccgcgccgagttcgttgaagcccgcggcggctggggcggtggcaatggcggtggctggggcggcaacaacggccgtcccggcgaaaccatccgctgcgagagccagagcaaccgtgagcgcagctgcccggtcggctggcgcaacgcccgcctggtccgccagctgtccggcagcccctgcgatgaaggccgcacctggggcgtgcgcaacggcgcggtctgggtcagcaacggctgccgcgccgagttcgccgaggcccgcggctggggcggcggcggtggctggggcggcggcaacagcaattattcgatcacctgcagcagcaacaacaaccgcacgcagaactgcgactgggatgagcgccagggccggccggtgctgcagcagcagctgtccggcagtgcctgccaggaaggccgcagctggggctatgcacgcggccaggtgtgggtgagcaacggctgccgtgcacgcttcagcgcgcgctgagccccggggtcggatccctggccgacggccagggctctgacccgtgggttcatgcagtgaccgggtcggaccctccgcaggagggatccgacccgaagatcagggtgccggcgccttctcgtcgccccacggtgcgggcggcagctcgaccggcttgctcaggtcgaacttcacgcggaaacggcggccttccgggcgcgtcagttcgtagacgaaagtctggtcggggtcgatctccatcgcccaggtgttgtgcgtggaggccagcatgtcggcacgacggaacatcgccaccgaatcggagtcggctgggaaccgctggcgctcggcggtgcccggtggcgtgctgtcgccgccatagagggtgatcgcgtcggggctaccgtcttcgtggcgatgatcgtgtttcaggcgcaggccgttttcggtgcgggtcagcacccaggtgcgcgaatggtcatcccccacatggaagggaatccgcagttcatgggcggggtcggcacagccgcgcacatgcatgaccaggcgctggccggcgaacgggtccttgccggtcggtgccggcgtgtcctccaccacccggccctcataggcctggccgcaatgcgcggcgatggcagccatgaaggcatcggccggtgcggtcgccagatcatgcgcgaccgtatcggaacgctgcgagcaggcagcgaggctgagcaggagggcggaagcggtgacaacggcaggcagtttcatgccccaaccctaacggccatggccgacgggcgcaaaccgcgcgcggcaaccggtcagcgttcggcgatgtgaggttccggccgcgtctcggtggccgctaccggcgcggactcgcccttgcccgccggctcctgctccaccggatcgacgtcgaagggtgtgcggaacaccagcgacggcaacagtgtggtcagtgcggcgtacagcagcagcgcgccgaacagcaccgccggaatctggaaacgctcgcgcatgatcgccgccagcaccagggtgaagatcagggtcggggccagcgccagcgacacgcgcaggctgctgcggaagctctcgccgaacatcacccggcgctgcagccagaccacgccgatgcgcagcggcagcaccaccagggtgatcacgatgcccagccccagcgcctcgaaactgagggcttcgctgggcaccttggtgccggcattgaagaaatagaatggcacgaagaacgaggcgaacaggcgcagcgcgtgcaggttctcgtgcgaggccagcagcggcatgcgctggtgcagcaggcgcgcgaccaggccggcgatgaacgcgcccacgaggtaatacacgcccagcagataggtgatgtacgccgccaccatgccgaccatcaccagcagcgagaactccgagcccggcgcgtgcggcgccacccagcggcccagcgcgatgaacagcagcggcaggccgatcatcatcgccagcagggccaggctggacagcgccatgtggcccgggtcgccggcctgcagcacgatgaacaacgccgccagcgccagcagttcgccggcgatggccttgctggtgacccagaaccgctcgtcctcgctcaggcccagccgcgacagcgaatccatgatgaagccggtggagggcgtcagcagcgccagcgccagcagcccagcggcctgccatggcagccccgcatagcgccaggccagccagcccacgccgaacagcgtgccggtacggatcaccaggtgcgccagcagcggccacatgccacgccgcagcgcctgcagatccacttccaggcccgcgaacaggaacagcgaggaaatgcccagcgtggccagcaggccgatcaccgcgtcgtgtgcctggtcgcccagccagagcatgccgatgatgccgaacagcaggcaggtcaacggcgccggcaggctgaagcgctgcagtgcgcgcgggatcaccagcagcgcgaagatcagcagcaggtagatcaactcatggctcatcggggtcttccgtggggttcgaacgcgcgcaggatgcgcgtgcccgaccgatccggcaagccatttcccaatgaccccggttacctcatccgatcatcgcatcggccagcgcccccacccgtgcaagcactgctgcgcgctggtcgtcatcgaccgatgcgccctgcagataggcggtgaccacccacgcggtgccgcccgcatgcggccacagcacggcgatgtcgttgcgcgtgtcatcaccgttgctgccggtcttgtcccccacccgccagcgcttgcccagcccggcgcgcaggcaggcatcgccggtctggttgtcgatgagccaatcggcgaactgccggcgcgatgcaggctgcaggccattgcccaccgcgaagcgggccaggctggtggccatcgcggccgggctggtggtatcgcgcgggtctcccttcgcgaacagattcacgtccggctcgttgcggtcattgcgggtaatgctgtcgccctgcccgcgcaggaatgccgtcagcgccgacggcccgcccaccacctccagcagcaggttggccgccgtgttgtcgctggtggtcagcgtgccccggcacaggtcgcgcacggtcagatccttgcccacgtggcggcgcgccaccggagcgtaggacagcagatccttcccggcgatgggcacacgggtgtcgagcgaaacgcggcctgcatcggcaaggctcagcacatgggcgaccagcatcgacttgaacgtgctgcacatcgggaagcgctcatcctgccgatgcccgccgatgcgacggccgttgccgatgttcagcacggtgacgcccaggcggccaccgctggctttctccagcgcggcgaaatcggcggcgccggcaatggcggcgttcgcggcgggtatgccagacgaggcggaaaccggttgcgccagcgccggggcaagcagcgaggacgcaacggcagcaccactgaactgcaggaatcggcgacgggcgagcataggggttctcctggtgaccgctcgattattggcgcctcccctgcgaccgaccagcgcgaaaaatcagggcaagccataagttgaactcatgcctgacgcgatcaaatgtttgagatttacgaaattcctcattgaacgggtaggatcagccatcaccctggctcacggctctccgatgctgcaccccaccctgccactgaacgcgctgcgtgcgttcgaggcggccgcccgccaccagaacttcacccgagccgcgctggagctgtgcgtcagccaggccgcactgagccaccagatccggggcctggaagaccggctcggcatccgcctgttccatcgcctgccgcgcggcgtggcgctgaccgacgagggcgcggcgctgtatccggtgctcaacgaatcgtttgaacgcatctccgccagcattgcgcgctacaccggcgggccggcccgggaagtactgacgctgggcgtggtcggtaccttcgccaccggctggctgctgccacggctggcggcgttcgaagccgcgcacccggacatcgagctgcgcctgcagacccacaacaaccgcatcgacctggccggcgaagggctggacctggcgatccgcttcggcgatggcgactggcagggccaggcctgcacggcaatcctcgatgcgcccttcgcaccgctgtgcgcccccgcattggcgcggcggctgaagcaaccgcgcgacctcgccacactgccgttgttgcgttcctaccgcagcgacgaatggccgcgctggttgcaggcggccggggtgagcggcgtggaagcccgcgggccggtgttcgattcctcactgacggtggcgatggccgccgccgggggcgccggcgtggccttgctgcccttgtgcatgttcgagcaggaactggccgaaggccgcctgctgcagcccttcggcaccaccttggagctgggccgctactggctgacgcggctgcgctcgcgcgccgagcgtgaaccggccaagcggttccgcgaatggctgcaggcgcagggcacgtaacaaaaaaggggacggaggggattaagtcgtttgtggcacaaacgacttaatcccctccgtccccttttttgcgtgatcaggactccagcagctccatccacgccgcttcggctttctccagctgcgcggcggtggtttcgcggtcacgtccgatcaccgccatgcgggtggcatcggcatagttggccgggtcggccagctggcggtcgagctcggccagcgcgccctccagttcggccaccttggcctcggcggcggccagcttgtgcgggttcaccggcttcttctgcaccacctgcgccaccggcgcggtcttgaccaccaccggctcttccacctgctccatgcgcgccttggtgccctgcgcctgcgggcgggtgcgcagccacgcggcatacgcgtccaggtcgccatcgaacggttcgaccacaccatcggccacgcgccagtaggtatcgcagaccaggccgatgaggtggcggtcatgcgagaccatcacgatcgcgccttcgaaggtggccagcgcttcggccagtgcttcgcgcatttccaggtcaaggtggttggtcggttcgtccagcagcagcacgttcggctgctgccaggcgatcagcgccagcgccaggcgggcgcgctcgccaccggagaacccatcgaccggctcgaatgcacggtcgcccgggaagttccacttgccgaggaaatcgcggaacgactggttcggtgcgtccggggcgatctcgcggaagtgctccatcggcgactggccttcgtgcagcgactccaccgtgtgctgggcgaagtagccaatcttcaggtccggatgcgccatgcgctcgccaacgatcggcgccagctcgcccaccagggtcttcaccaaggtggtcttgcccgcaccgttcgggccgagcaggccgatgcgctgtcccgcttccaggccgaagccgacgttgtgcaggatcaccgcgtccttgccgtagccggcctcgacgtggttcaggcggatcagcgagaacggcagcttcgccggcggcgcgaactcgatgcggaactcacgctcggcgcgcaccgcttcggtgccggccagcttggccaggcgcttcatgcggctctgcgcctgcgcggccttgctggcctgcgccttgaagcggtcgatgaagctctgcaggtgggcgcgctcggcctgttccttttcatgcgcgatctgctgctggcgcagctgttcggcgcgctggcgctcgaaatcggtgtagccgcccgggtagagcttggcgccgccgccatgcaggtgcagggtgtgggtggccacgttgtcgaggaactcgcggtcatgcgagatcagcagcagggtgccggggtacttcagcagccactgttccagccagtacaccgcgtccagatccaggtggttggtcggttcgtcgagcagcagcaggtcgctgggcatcatcagcgcgcgggccagattcaggcgcacgcgccagccgccggagaacgaggacaccgcacggtggtgcgtctcggcagggaagccgaggccgtgcagcagcttgccggcacgcgcttcggcgtcgtaggcccccatctcggccatcttggtgtgcgcgttggccaccgcctcccagtcttcgcgcgcggtcgcctcggcctcttcggccagcaccgcggccacctcggtatcgccgcccagcacgaagctcagcgccggatccggcagcgacggggtttcctgggccacgctggcgatgcgcaccttgccgggcaggtcgacgtcacccttgtcggcctccagctcgcccttcaccgccgcgaacaggctggacttgccagcaccgttgcggccgaccacacctacccggtaaccggcgtgcagggtcaggtcgacattggacaacagcagccgctcgccgcggcgcaaggcgaaattacgaagggagatcatcgggggaggggtccatataaccggatggaatgtgctggtgagcactgttcctgcgacgcaattctagcgttaacgaatacttgacgcgtcccgggatgcgcagtggccgacgttcctctctcccacgtccccgccgcgcgcgtcccggggtcccttcctgccagcgctgatccgggctaaatggttgctgctgcaacgttttttctgacgcctggcatttgacaggcactgaatatcccgttaattgctgtattgcgcaccgcaacaaccgccgtccgcctcacgctcgtgatgtcgattccggtgccgcccccgccaaccggagcccatcccgatgacccgcaagacccgcctgatcgccgccgccgtcgctgtcgcactcggtggctctccgttcgtcgccgctgcacagcaggccggcaccgccgccaacaccctggacacggtgatcgtcaccggcacccgcgtggccgaccgcacggtcgccgaatcgcagtcgccgatcgacatcatcacccccgaagtgctgcagtccaccggtaccagtgaactggccaccgcactgtcgcgcgccctgccctcgctgaacttcccgcgcccggcgctgaccgacggcaccagcggcgtgcgcccggcgcagctgcgcggcctgtcgccggaccaggtgctggtgctggtcaacggcaagcgccgccacacctcggcgctgatcaacgtcaacggcagcatcggccgtggctcgtcggcggtggacatcaacgcgatcccgatcgccgcgatcgagcgcgtggaagtgctgcgcgacggtgcctcggcgcagtacggctcggacgccatcgccggcgtcatcaacatcgtgctcaagggcagcggcagtggcggcagcctggcagtggactacggccagtactcggccggcgacggcaacaagtaccagctgtccggcgacaccggcgtcgagttcggcaacggccgcggccgcgtgcacgtggccggccagatcagccagcaggacgagagcaaccgcgccggcccgtaccgcggcaccacgccgaacaccggcaacttccccagcatcggccagaagaccttcatcgtcggcgacccgcgcgtggatgccaccgcggcctcggccaacgccagcttcgacttcagcgaccacgtgaccggctacgccagcgcgctgctcagcaaccgcgacatcacctcgttcgcgttctaccgttcgcgcaaccacagcgggcagagcgcgctgctggcgcagacctacccggacggctacgtgccggagatcaaccagtattccaaggaccgctcgctggtggccggggtcaagggcaacaccgacaacggctggacctgggacctgagcctgaaccacggcgagaacaccctggacttccacacccgcaacagcatcaactacagcctcggtgcgaccagcccgcgctcgttctacgacggcacgctgaagtaccagcaggacatcttcaatgccgatctgaccaagtcgctggactggggcctggcctacccggtcacgctgtccttcggcggtgagtaccgcaaggagaagtgggaccagaacccgggcgaactgaactcgtacaccggcagcggcgcgcagggcttcgcgggcttcaccccgaccaatgaagtgcatgccgaccgccacaactacgcggtctacgccggcctggaagcggacctgaccgacaagttctcggccggcatcaccggccgctacgaagactattcggacttcggcgaccgcttctcgggcaagctgtcggcgcgctacgcgttcaccgacaaggtggcgctgcgggccaccgcctccagtggtttccgcgcgccctcgctggcgcagcagggctaccaggcggtgaccagccagttcctcaatggcgtattcgtcgagcgcggcaccttcccgaccaccagccaggccgcgcaggcgctgggcgcctcgccgctgaaggccgagacctccacctcctacagcctgggcctggtgctgcagccggtcgaccgcctgtacatcaccgtcgatgcctaccagatcgacatcgatgaccgcatcgcgctgtcgtcgagcatcaccaccaatgccgcgaccagcgcgctgctgggcaccctgggcctgccgcaggtgaccgcgttctcctacttcaccaacggcctggatacgcgcacccgcggtgtcgacttcgtctccagctacacggtaccgttcagcgccagcagcctggagctgaccgcggcatacagctacaacgacaccgaagtgcgccgcgttggcggcaccccgccggtgttcggcacgctgggcctgacccagtcgctgatcggccgtgatgagatcggtcgcatcgaggacagctacccgcgcgacaaggcgatcctgagcggcacctggcgttcggaccactgggagctgggcctggccgccacccgctacggcaaattcaccgtgcgcaactcggccaccgcgctgcgtgaccagacctacggcgacgcctgggtggtggatgcctcggccagctacaagcccagcagcaactggaccctgaccgtgggtgccgacaacctgctggacaagtacccggaccgcaccgaagacctgcagaactccaccttcggcatgctgccgtacagcaactactcgccgttcggcttcaacggcgcgtatgtgtacgggcggatcaagtacacctggtaaggggtaatgggtgcgccgggccctgcccggcgctgctccacacacccgcccgcggcctcggggcaggcgcggccctgaccgtataccgttgccagctcctgcacccggtttccaggctgtgctctgttgcacgcgcctcataggtcgtcccgtgcataatcagcggaccaacgaaggagccgctccgtgacgagagcctgcatcactcgccgccatgtgtacgctgcgctcgcgtgggttgcgctggcggcccccctgtcagggtgttcaggagatcacgtgaaacccagctattccaaatcgagccttgagccggtcgtcgtcacccagctctccgcgtcgaagctccaggtccagttcaatgaaccgatggaaagcatgtattacgcggcagggatgagctatgtcgtggaaggggacaccatgaaagtcgttgttgatcgctgccccatatccggccaatgcacaaccatgctgcggcgcgacgtgaagcccggacctgctggcccggcccgtcaggaaattcccttgatggcgccgcgcgtggtgatgctgtacgccgatggcgaaacacagatttttccgtaagggcatccgatgagcgacaaggtcgtcctcggcatccatagtcacgtagaccccaatacacaggggtcgttcaatcagttcgtggacggccacgcctggatctcggtgacgcgaaacggccatacgacgttccatggcctgtggccagacaaccatccactcgttgaggacaatggcccaggttcggacatccgcgaaggcatggaagcgcgggccacaccttcggcctcacgctattacgaattgactcccgagcaggtcaagcgacttgaccaggccttgggcgaaaatgtcacctggtcatatggcaatacctgcgcatcgtgggcgaccagtaccgtgaacaaggttaccgggcagtccctggatgcaggcgaactgctgttcaccgatacaccgcgggagctgatcgagtccattcgcaaggcagagcgcgtgcggcccaccagtccttcgcagccgcaaccggcagccgaacggccggaaaccagcatcccatcgctgagcgatgcctcggcatcgcttcaccagcaggcacacgccggcgtccacgcgctggacgcatcgctgggtcgcgcatctgatgaatccagccaacgcatggcggccagcctcacccaacttgcccgggcacaaggtctggaacggatcgaccatgtggtattgggcttgccggctggtcagcccccaaggccggagaacatcttcgtcattcaaggagccttggatgacccgggccatctgcgtgcccacatcaacattgaaacggcccttcagccacccgttgcggagtcgctgcggcagattcatcagttggacaagcagctggccgcctcgccgcagcaggccgagcctgccctggaagagacccagcgccggcagatggtgtgatcatcgacggctacgcctggagccccccataggtaggcaccattcggcccgtcagggcctgccatctctcaacaaggcttgatatctcgcccgtacaagccgcccacgcaacgatccgatacgctggccaggtttgccgtatgtgaccgcatcggtgaaaatcggggcatcccccgatttcctgcgagtgccgatgcaccatgacaccgacctgatcaacatcgttgccgttggcctggggctcgccttcatcttcggcgcgctggccaacaagctccgcttgtctcccctggtcggttacctggttgctggcatctgcgtaggcccgttcactcccggcttcgtcgccgaccaggcgctggccaaccagctggccgaactgggcgtcatgctgctgatgttcggcgtcggcctgcacttctcgctgaaggacctgatggcggtcaaggcgatcgccattcccggcgccatcggccagatcgcggtggccaccctgctcggctggggcgtggcctcgctgatgggctggccggccatccatggcgtcatcttcggtttctcgctggccaccgccagtaccgtggtgctgctgcgggcgatggaggaacgccgcctgctggaaacgatgcgcggcaagatcgcggtcggctggctgatcgtggaagacctggcctgtgtgctggcgctggtgatgatgccggtgatggccggtgtgttcggtcctgacgcggccaaggaatcgcactcgctcggcagcgtgctggccgacatcggctggaccttcgtgcagctgggcctgttcgtggcggtgatgctggtggtcggtcggcgggtcatcccgtggatcctcgagcgcatcgccggtaccggttcgcgtgagctgttcaccctgtcggtgctggcgatcgcgctgggcgtggcgttcggctcggcgatgctgttcggcgtctcgttcgcgctgggcgcgttcttcgccggcatgctgctcaacgaatcggagctgagccacaaggccgcgcatgattcgttgccgctgcgcgatgcgttcgcggtgctgttctttgtgtcggtcggcatgctgttcgaccccaacatcctcgtccagcatccgtggcaggtgctggccaccgtcgccatcatcatgttcggcaagtcggcggcggcattcttcatcgtgcgtgcgttcggccacccgaccagcaccgcgctgaccatctcggccagcctggcgcagatcggcgagttcgccttcatcatcgccggcctcggcgtggcgctgcagatcctgccgaaggaaggccagtcgctggtgctggccggcgcgctggtgtcgatcatgctcaacccgctggtgttcggcctgctggaccgttggcaggccaagcaggagcagtctccgcaggtacccgagccgcccgaagcgatcggcccgtcgcgcgacctgcatgaccacgccatcgtgatcggttacggccgcgtcggcagcgaactggcgcaggtgctgcgcgaccgtggcgtgccggtgctggtgatcgatgacaacaaggaacacgtcgagcaggcacatgccaagggcctggcggcgatccgcggcagtgccgccgccgaccgggtgctggccgaggcccatccggagcgcgccaagatcgcggtgctggcgattccgcagccgctggaagccggtgaggcgctggccaagctgcgggcgatcaatccggacctgaccctgctggcgcgcgcgcacagcgatgccgaggtgaagcatctgctggagcacggcgccgatggcacggtgatggccgagcgcgagctggcgtattcgctggcggagatgatcatgtccacgccgccgtaccggaacctggggcagcacagcattccggtggtgtgaggggtgtgcgtgcggcagggcttgcagccctgcacctgccgaaacaacggcaacggcaaaagcgggcatagcgtgggatggcggggtgggtccgattgcgggagacgccgtaaacccttccatgggggcttggccgcggcatccatgccgcggacactcccgcaaccggacccaccccgccttcgacagttccccgctgctgttggtggatgtcgaccttggtcgacacggcggcgcgcggggtcagatccgttttccacaggaaaacggatctgaccccggaaacaaaaaatccccggtcgacccgcatcgaccggggatctggatcgccacgttgccatgccttggagaggcagttccaccgtaacccatcgcggtgccggcggtgatcgcctgtggcgatgacgaccaagccgatgtgctcgatgccgatcgacagccgcacggtgtcctcgctgacaccggccttggccagctccgctgcatccagctggcgatgcgtggtcgaagccggatgggtggccagtgacttcgcatcccccaggttgaccaggcgggtgaacagcttcagcgcatcgaggaagcgggcgccggcctcgcgcccaccgggcagaccgaaggtcagtacgcccgagccgtgtccacccagatagcgctgcgcggcggcatgctcggggtcgtcggccagtccggcgtagcgcacccaggcgaccctggcatgcgccttcaggaactgcgcaacggccagcgcattggcattgatgcgttccatgcgcagggccagggtctcgatgccctgcaggatcaggaacgcgttgaacggcgacaacgcagcgcccgtattgcgcagcggcaccacccgcgcgcggccgatgtaggccgctggccccagggcttcggtatagaccacgccgtggtaactggggtcgggctggttgagccgtgcgaagcgttggggctgtgcggtccagtcgaagcggccggaatcgatgatcgcgccgcccaggctgttgccgtgtcccccgaggtatttggtcagcgaatgcaccacgatgtcggcgccgtgctcgaacgggcgcagaaggaacggtgtggccacggtgttgtcgacgatcagcggcacgcccgcggcatgcgcgacctcggcgatcgcagcgatgtcggtgacattgccgcgcgggttgccgatcgattcgacgaacaccgccttggtgcggtcgtcgatcagcgtggcgaacgcggccgggtcggccggatcggcaaagcgcgcctggatgccgtactgcggcagcgtgtgcgccagcaggttgaggctgccaccgtagagcgcactggaggcgacgatgttgtcgccggcctcggcgatggtctggatggcataggtgatcgcggcctgccccgaggccagcgccagcgcgccgatgccgccttccagcgcggccaggcgctgctccagcacgtcggtggtggggttcatgatgcgcgtgtagatgttgcccggaaccttcaggtcgaacaggtcggcgccgtgctgggtgtcatcgaaggcatacgccacggtctggtagatcggcaccgccaccgcgcgggtggtcgggtcgggacggtaaccgccgtgcacggccagggtttccagttgccactgcgggtcgctcattgcaccaggctccatccgggaaaccgccaccataggccagccggggccgcccgctgaaagccgctggcgatgacgtccgtacccgcggttatcaggttggccgcgattcaggcagtcgtcatggggcgttgctaggctgcgccgccgggcgctcctgcctgggaacggaggccccacgcatgcagccatccccctggactccccctgccagcagttcgcccacgtcggtcctgctggtggaggacgaccgtcgcctggccgaactggtcagcgactatctccacgaacatggcttcgccgtgcagcacgtggcacgcggcgacctcgccagcgccgcctgccgccagcatgcaccggaactggtggtgctggacctgatgctgcccggcctggggggcatcgatgtgtgccggcagatccgcagcttctccgatgtgccgatcctgatgttgaccgcctgtgaggacgacatcgagcaggtgctgggcctggaatcgggtgccgatgactatgtgcacaagccgatcgagccacgcctgctgctggcccgcctgcgcgccctgctgcgccgccgccacggcagcagcaataccggcacgcccagccggctgatgcatggtgagctgctgatcgatcgcatgcagcgcgaggtgcacctgcacggccagccggtcgagctgggcaccacggaattcgagatcctgtggctgctggccagccagccggggcagatcctgtcgcgcgaccagatcctgcaggcggtgcgcggcatcggcttcgacggtctggaccgcagcgtcgacgtctgcatcggcaagctgcgccgcaagctcggcgacgatgcgcgcgaaccgcggcggatcaagaccgtgtgggggcgcggctaccagttcaatcctgcggcctggtcggaatgaagcggctgttcctgtggctgtggttcatcaccggcgcctgcttcctggtgtcggtgttctttctcaaccacatcctggatggcatctacacgcccgtgcaggatcgcgtgttcgtgcagcaggtgcgcgggcaggtgtacgccctgcgcagtggcctggccggcctggacgccgtccagcagcgtgagcggctgcaacagtggcagccacactacggcatcgccctgaccctgctcgacaaacctcccgcgctcgacgcgcaggaacaggaggccgtgaaggccgatggcttcatcgtgcgcgatcagtaccagcaggtgctgctgcccatcgacggcatcggcggccgctggctgcacctgcgcctgcccggcgcggtgcagatgacgacgtacatgaccatcgccgcctacctcagcatcctgctgctggtgggcgccagcctgtatgcctgggtgcgcctgctctggcgcgacctggaagcactgcgccggcacgccgaccgcatcggttccggcgacctgcaggcacgcgcgcaggtttcgccccgctcgcagatccgggtcatcgtcgaacactccaaccgcatggcggcacgcgtggccgaactggtgcagcgccagcgcgacctgacccatgccatttcgcacgaactgcgcacgcccatcgcgcgggtggccttcggcctggacctgatgctggacagcgatgaccgcgaacgccgcgaacggctggcgcagggcctgcacggcgacctggccgagctcaaccggctggtcagcgaactgctggcctacgaacggctggagcatcccagcgagggcgaaccgatgcagcgcatcgaagccaacgactggctgcaggcctgcctggccgatgcccgccgcgatgccgaacgtgccggcattgtcctgcgcgtgcagcccagcgcgttgccgcgagtggatgccgagccacgcctgttgcagctggcgctgagcaacctggtcggcaatgcgctgcgccacgcgcgttcgcaggtggaggtctcgctggtcggtgtcagcggccgcgcctgcctgcgcgtggacgatgacggcccgggcatcgccgaagccgatcgggagaaggtgatgcgcccgttcacccgcctggacgacagccgcagccgcgataccggcggcttcggcctgggcctggccattgtcggccgcattgcagcccgccacggcggcgagctgcgcatcagtcgcgccacgctgggcggcgcgcgcctggaaatgcactggccgctggctgccagctgaactcccaacggcgcgattacagttgattacaactcccgcacaactgcggacggatcggtcgccggcatatcgccacgctggcaaccctgcagcactcgccggatgcgcgcgctgctttcctcccattgccgagagtttccatgtcccagcttcgccgttcccccgccctgctctgcctggccgtgttgccgctgttcgccgccccgatcgcccacgccaaggatgaccactggaccttcgagctcgccgccggtggcggcgtggcaccgcgttacagcggcagcgaggagtatcgtgcgacgccgtcgctgtcatttgatgtcacctcgccggggggatggtttctgggcaccagtggcatcggctggggcacctccctcggcgagcacacgcgcgtgcgtgcctatgtcggcgccagcggcatccgcaaggacaaggactcgctgctgggcggttcggacttcctgcgcggcatgggtgatatcgatacccgtcccctggtcggcgtctcggctggttatacgctgggcgaagccgtgctgagcggctcctggcagttcacccgcaaggacgaggacaaggccgagaacggcctggccacccagcagatccatctgaacctgagcatgccgctgttcgacttggccggtggcgtggtcagcggcagtgtttccaccgactacggcaaccgcggctacatgcagacctggtacggcgtcagcccggaacaggccaaacgcacgggcttcgccgagcacaggccgaaggccggcctggtcagtgccggtgtcggcctgaagtggagccaccgcgtgggccgcaacggcaactggtacatctcggccgaaggcacgcgcctgctcggcgatgcggccaacagcccgatcgtgcagaaggcagaccagttcgggctgatgagcggttacacccaccgcttctgatgcatgaagggcgccgctgggcgccctttccctctgcggtcagcggcaggccggtgcgtcgccgttgccgcacaacccgacctcgcgcagccagccgatccactgcacgacgtcctccttctccggctcggagcggaacgacttctgcacggtgtggaagccctgcctgccctgcacgcccttgatccaggtgaactccggcttgcctgtccccggattccgcgggcagctgagcatcagcagggcgaagggccgtcccccttcttcaccttcgcggatccagtggctctgcgccgccggacaggcgatgcgccaccccgcctcgatgatgccgaggaactcacgcggactcacatggccactgttcggcgcatcgttgacggtgaccatgtcggtccagtcgtgcacggtctggccctgtggcacgtactcggtgatgcggttgccttgcgcgtcggtgctctggtgggcctgctggtagcccttcatcggcggcagctggacctgttcggcggccgcggcgtgtccacaaacagcagccaacgccagcgtcatgcagagtgaagccctgcgggcaacgtccatgcggttctcctcatccttgcgaaagtgaaacaggaccatcgtgcgctgccaaggctcggatggcgccccagccatggccggggcgccaccggttcaagccttggcgaacaccaggcgaccaccgtcgttgccgacttcgatggtatcgccgttgacgaaggcgccggacaggatctgctgcgccaacgggttctccagctgtgcctggattgcgcgcttcaacgggcgcgcgccgtacaccggatcgaagccgacgttgccgagcaggtcgaaggccgcatcggagaccgccagcttcagcccgcgctcggccaggcgcttctccagcccgcgcatctggatgcgcgcgatctgcttgatctgctgcttgtccagcgggtggaacaccacgatgtcgtccaggcggttgatgaactccggacggaagtgcgcctgcaccacgcccatcaccgctgccttcatctgcgtgtaggcctccgggctgtcgtcggcactcatgtcctggatctggtgcgagcccaggttcgaggtcatcacgatgacggtgttgcggaagtccacggtacggccttggccatcggtcaggcggccatcgtccagcacctgcagcaggatgttgaacacatccggatgcgccttctccacttcgtccagcaggatcagcgaatacgggcgacggcgcaccgcctcggtcaggtagccgccttcctcgtagcccacgtaacccgggggggcgccgatcaggcgggcgacgctgtgcttctccatgaattcgctcatgtcgatgcggatcatcgcgtcggcgctgtcgaacaggaattcggccagcgacttgcacagctcggtcttgccgacgccggtcgggccgaggaacaggaacgagccggccggacggttcggatcggacaggcctgcacgcgaacggcgcacggcatcggagacgaccttgatcgcttcctcctggccgaccacacggttgtgcagcacttcttccatgcgcagcagcttgtcgcgctcgccttcgagcatcttgttgaccggaatgccggtccagcgcgacacgacctcggcgatctcctcgtcggtgacccggtcctgcaccagcttgaagtccttgtgctcggcttcctgggccgcggccagctgcttttccagctgcggcaacaggccgtactggatctcgctcatcttggcgaaatcctggcggcgctgcgcggcttccagttccagcttggcctgctcgacctgctccttgatcttggtggcgccctgcagcgcagccttctccgacttccagatttcattgaggtcggagaactcgcgctccagcccgtcgatgtcgttctccaggtcggccagccgctgccgcgaggcttcgtccttttccttcttcagcatctcgcgctggatcttcagctggatcacccggcgttccaggcgatccagctcctccggcttggagtcgatctccatgcgcaggcgcgaggcagcctcgtccatcaggtcgatggccttgtccggcagctggcgatcggtgatgtagcggttggacagcgtggcggcggccacgatggccgggtcggtgatctccaccccgtggtgcacggcgtacttttccttcagcccgcgcaggatcgcgatggtgtcctccaccgacggctcaccgacgaagactttctggaagcggcgctccagcgcagcgtccttctcgatgtacttgcggtattcgtccagcgtggtcgcaccgatgcagtgcagctcgccgcgtgccagcgcaggcttcagcatgttgccggcatccatcgcgccgtcggccttgcccgcgccgaccatggtgtgcagttcatcgatgaacaggatgatctggccttcgttcttggccaggtcgttgagtacacccttcagtcgctcctcgaattcgccgcggaacttggccccggcgatcagcgcgcccatgtccagcgacagcacgcgcttgccgcgcaggccctcgggtacttcgtcgttgatgatgcgctgggccagcccttccacgatcgcggtcttgcccacgccgggttcgccgatcagcaccgggttgttcttggtccggcgctgcagcacctggatggtgcggcggatttcctcgtcacggccgatcaccgggtcgagcttgccgctctcggcccgcgcggtcaggtcgatggtgtacttctccagcgcctgccgctgctcctcggcattctccgactgcacgttctcgccgccacgcagcttgtcgatcgccgcctgcaggcgcgtcttgtcggcaccagcggcgcgcagcgccatgcccagcgtgccgccatcgtccagcgccgccagcacgaaccactcgctcgcaatgaaggcgtccccgtgctgctgcgccagcttgtcggtctggttcagcaggcgccccagatcgttgcccatcgagacgttgccggcctggccggataccttgggcagtgcgtccagcgcctcggtcaggcgctcgcgcagcaccggcacgttcaccccggcctgggccagcagcgggcgcgtgctgccaccctgctggtccagcagcgcgctgaacaggtgaaccggttcgatgatgctgttgtcgcggcccacggccaacgactgtgcgtctgccagcgcctgctggaaacgcgaggtgagcttgtccatccgcattgcgaatcctcatcggtcttcagggccggcctgggccggcaatgctggaaagatgcggttgccccacccggtttcaagggtggctgcgactgcaccccggggccagtcagcctgcggccagcatgccggagcgcgtgtggtcggcgcgttgatcccgatcagttccgcacggtggacgggctcagcgggtgatcgcgctgcggatcgcccgcagctgctgcttgatcgcccgcgcctgtgcaggatccatgcgtagcagggccttctgcccgatcgagcgtgactgcagggtgggatcgacgaagcgatagcggccgcgctcatcgcgctgcaccagcggcgactgggccagttccggggtgtccagcaggtggtcgatcaccatgaccaggcggtcgttgaaatagccctcgggccggccaaggtcggcataggcctgctggatcagcggatagaagcgcttgtaagcggtagccgttgccgccgggtccagcgcagtgaacgcctgtacgtaaggcgcatagcgtgccgcattgctggcggcgatgcgttcgccgccttcgcccgtatcgacctgcaggttgcccggcagcggccgcgcggccagcgcggtcggcggcacgctgggcttgtccaggttgtcgacctgggtgaccaggcgctggatcaggtgatcacgcagcagcagggtcagcggcccctcgccttggaacagctggctcagtgcgccccaggccgcggcgtcgctgtcagccagtttcggcagcgccgggtcggcggcggcctcggtatccagcggatgcctgatcgatggtggtgctggcgcgggctctgcggccgcctgcggttgtgccggtgcactggtactggcaggggttgattgcaccggcaccgggacaccgtcggccaggctcttcagctgatcgcggaacaaccagccgcccgcgccaccgatcaccaccacacccaacacccagggccagaccgcctttccactctgcatgatgcagcacctcgtttcacacgcaatggagaaggtgtgaccccatcgagtgcagccggttccccgcctgttccgctgccgttcgggttgagacctgcagcaaggccgcgctcacgtctgctttgcgccacccgcgcgaggctaggagtcctgtcccgtggagactctgccatgcagtacgcgctgtactactggaccggcatccagggccgtggcgagttcgtgcgcctggcgctggaagatgccggcgccgactacatcgacatggcgcgggtgcacggcgatgcggtgatgcagccgtttctggagggtcgcaacgaaggggcacagccctttgcgccgccgttcctgaaggccggccgccaggtcatcgcgcaggtcgcggcgatcctggatttcctcggcccgacgctggacctggtgccgcaggccgcatcgcggcggatgcaggcgctgcaactgcagttaaccatcgccgacctggtagccgaggtgcacgacacccaccatccgatcgccgcatcgaagtactacgaacagcagaagaccgaggccaaggcacgagccgcgtcactgcgcagcgagcgcctgcccaagttcctcggctatttcgagcaggtgatggccgccaacggtggccgccatgcactgcgcgagcactcctatgtggatctgtcactgttccagctgctgagcgggctggactacatgtttccgcgccgcatgcaggcgctcggccccaccctgccccggctgcgcgcgctgcaggaacgagtggcgaaacgacccaacatcgccgcctatctggcgtctgagcggcggttgccgttcaacaccaacggcatcttccgccattacccggaactggacgccgaacggtagtgccggccgctggccggcagagcgcgctgtgatcattcgccgcctgcaacacgcccctgtagaaccgagccatgctcggctcagagcagccgagcgcgggctcggctctacagagcaccagaagtggaaggagcggtaacgccgggccatgcccggcgtcaccggtcaatgatcggtgcgatcatccagcggtttcaccggctgcttctgcagcgacagcaggcccagcagcagcgccaatgccacgtaggcgccggcaaactgcaaactgatgatgcgcgccaatccttccaggtcccacggcaggtagatgccaccgcgcgggtccaccgagtggatcaggccgaacagggtcagcccggcggccaccagcaggacgccacaggcacggcgcaggcggccatcgaccatcgccgccacggccgagatccacagcatcgaggtgatgatgaagccattgcccagggtgaagatcaccgccagctccggcaggccgtggccgtcgagcttggtcagcagctgcggcagctggtccggtgcgatccagcccggcgccttgatcgccagcaggtaggccaccgacggcaggaaaccgaacaccatcgcgccggtatggtggcgcggcgtggcctggaaggcctgggtggtgatgtcgatggccacgtacacgatgatcggtgccagcaccgccagcggcagccattgcaccaacccggagatgatgccgagcatgccgccgatgccgacgaacaggccggtcagcagcgtgtagccgctgcgcgcgcccatgtgcttgtaggcaggctggccgatgtagggcgtggtctgcgcgacaccgccacagacacccgccaccagcgtggccaccgcttccaccagcaggatgtcgcgagtgcggtagtcatcgccagccgcgcgtgcgctctcagacacattgatgccgccgaccaccatcagcaggccgaacggcagcagcagcggcaggtaggtcatcgccgtgggcaggccctcaaggaagcccagcgtcggcagcggcagcaccacctgcggcggcacccattccggcacatggaagccgggcgcgcccagcccggccagtccaaggccgtaatacagcacggtgccgaacacgaaggccagcagcacgcccgggccacgcaccggcagcttgcccttggcgatcagcacatacagcagcaggcccagcgtggtgaagccgaccagcggcgagcgcagcgtttccagcagcggcagcaggcccatcagcaccagcgcgatgccggcgatggaacccagcagcgcagctcgcggcagtgcgcgggtgaccgcttcaccgaagaacgacagcacgaacttgagcacgcccatgatgaccagcgcggccatgcccagctgccaggtggcgatgcccgcagcgtgcgggtccatgccctgctgcttgaacgcgaggaaggccgggccgagcaccagcagggccatgccgatgctggtgggggcatccaggccgagcggcatggcggtgacatcgtcgcggccggtacgtgccgccagccggcgcgccatcagggtgtacagcaggttgccgaccagcacgccaaaggcggtgccggggaacattcggccgaacaccacgtcggcggggaactggaagatcccgaccagggccatggcgatgaagccgaggatggagaggttgtcgacgaccaggccgaagaagccgttgaagtcgccggcgacgaaccagcgacgcggtacggcggaagcgggagcggacatggaaggggcggtgggggtggggagcgccgatggtaggcccagcgaggccggcgcgccaattccgtcgtggaatgatgggttccagccaacggcggggcccctcgtggctggtcgcgggtagagtcgactgttagtcgactggcattgcgagttcggccggtcgggggggctgcgcaggacacgccgtaaatccccagaccggcccagccgctggcggctgtgcgttcgggccttgcgaagcagtgcttcgcaagcaaagcgccctcacccacgggggctcgatggcgccatccatggcgccaacggtcctgcgcagcccacccgaccgacccctgacagtttcctgcgcgcggcagccacggaagaagatcaaaagatccaaagccaaggcaggctctcgctgcagtgccgagcccatgctcgcccgctgtacgcgaaggctctgagccgagcatggctcggctctacagaagattatttcgatcattcgttcgttcatccacgcatggcgtggatctaccgtgtcgaccaaggtcgacacctaccacacggatggccgccgttgcttccgagtggccggccagcggccggcactaccgcgggtgcagggcgcagccctgcatcgaccaaccctctacttcttcaggaagttgtccaccagcagatgcttcacgtcgtcgaagcggccgttcaacactgccttggccgcgtacaacgccgtaccggccacctgcttggcctcgatctgcggcggcatcaccagctccgcgcggctggtatgcacgtccagcagcgccgggccgcgctgggacagcaaatccagcaccgcctcttccagatcctcgctgcgggtcaccgtgcggccgtggaagccgatgacctcggccaggcggccgaagtccgggttcttcaggtcggtgtagttgtccagcaggccctccaccttctgctccagctcgacgaagttcagcgaaccattgttgaacaccaccaccttgatcggcaggttctcctgcactgccgtgagcaggtcacccagcagcatcgccaggccaccatcaccggacagcgagatcacctgccggccggggaaggccttctgcaggcccagcgcctgcggcatcgcgttggccatcgtgccgtgcagcaggctggtcagcgtgcggcggcggccgttgacgcggatatggcgcagcacccacaccatcggcgaacccccgtcggcggtgaacagcgcatcgtcgctggcatgcctcgacagcaatgccgtcagatgctgcgggtggatcagttcaccctcgcccggctgttcttcctgttcgcgcttcttcagcgccttgtcgcgacgcccgatgcactcgtccaggaaactgctgtcctcgcgcggcggcagcatcggcagcagcgcgtccagcgtcggtgcgatgtcaccgaccacgccaaggctcaccgggtggcggcggccgaggtgactgccatcgcggtcgacctggatgatcgtggccttgtccgggtagaactggccccaggcgaaatcggcgccgagcagcagcagcgtgtcgcactccatcagcgtgtggaagccggattcgatgccgaagatgccggtcatgcccatgttgtacgggttgtccggctcgacgaaatccttggcgcgcgaggtatgcgcgatgggcgcctgcaggcgccgggccagctccagcagctgcgcgtgtgcgccctggcaaccggcaccggcatagatgccgatgcgcttgccctgccccagcagttcggtgatgcgctgcagctcggcatcggacgggcgcagcaccggctgggtgtagtgcaccgagaacggcacatcgtgcttcacctcggcctggctgatgtcggccggcaggatcaccaccgccacgccacggcggctgatcgcggcctggcaggccagggccacgacgcgccgcgcctgctccgggctgtgcacctgctcgcagaacaccgaacaactggcatacaccgccttgaagtccacttcctgcggaaattccatgcccagctcactggtcaccacctggctggcgatcagtaccatcggtgcacggttgcgattgctctcgaagacgccgttgatgaagtgcaggccaccgggaccacaagaacccgcacaggcggtcaactcgccgctcaccagcgaatcggcgccggcagcgaaggcggccacttcttcgtggcgtacatgtacccagtcgatttcactgcggtgcagggcatcggtgacgtgattcaaggtatcgccaacgatgccgtaacagcggcggacgcccgcctgctgcagggtatcgacaacgatctcggcaacgcgcttgctcatcggatacatcctcgaggggagagcatccgaggctagacccgaagaagtgatgcctccgtgggcaaggcgcacatcacctcgataggcaaactaccggcggagatcgagtcaatcgttgacgttgatccagccctccaccgcgccctgcttcgggttgcggtagcgcagcttcacccagccatcctgttcatccagcatctccacgcggtctccctgcaccaggtaacgcctggtgctggatgcgccgggttgatcgaacaggaacagccgcgcgggtaccacggtggcctgctggccacgcaacggtccatccggcggtgcacccaggccatcggcgatggcactttccagcacccggccggcggcatcataggtgcgccagaccgccagcgggccctgctcgccggtctgttcccactgcagcgcggcgttcaacgtatcgcccagcatcagcacgctctcggcgcggtacagatagagcttcgcgcctgcaaaccggtactgatcggtgtaccacatcgggccgctgcggcagctgctggtcagcgtgcggctcggacggtcgaccgtaagccccatgaggtcaccgcaactgtccttgccgtgggtatcggcctgcagcgcgcggaacccggcactggccggatcgaagcggtacacggtcaccgcttcgttgaccatgcccaccgaggcgcgcgcgaccagttccgggtagccatcgaaatcgacatcttcgagcgaccatcgcgaattgccgtcggcatcggccgcgccctcaagcgtctggcgcttgcctgacggtgacagctgcaccgcgatgctgccgtcctgctgcggatcggcatgcgcctgcacatgcgcggccacctggaagcgcagcgtttcgccgtcgtccccacccgcctgcgccgtcggtgccagtacgcctgccaatgccaggcccagcatgcattccctgtagttcatcattgctccctgcggcacctcggcggcaccttccactcagaacgatacctcgaccggctgccgcgaccacagcaccgattgatgtttggtctgctgcttccacgccaggcggatcgcctcgatatcggcacggcgctgcggggtgtcttcgtgcagcaccaccagcaccttggtgcgcagacggttgggcgaggcatcaccgcggaacagccactggccgtaggcatcgaacacggtcaggccatccggaaagcgcggggtcacttccttgtccaggaaggtgcgccactgcgcctcgctgatggtgtcggcctgcgggcggttgccggcgccctgctcttcgcctacgccgaagtacagctcgctgcgcacccagccgtggccggcggacggacgcgcggcatcgcccttcagttcggcggtggtggccgtggcataggcgctgggcgcctgcgaagagaggctggcgcagccactggtggccagcagcacggcgaagacgaggccaaggtgtttcatcggtacagctccggggaaggggaacagggcgagccggcagcgtacagcgccactggcccggcgtgctgatgccaaccgggcatcagctcatgccggaccggcagggacttgcatcggcaccggccatcacgcgaagataatatatcgcttcatccggatggatgtaagtgaaactatctcccccttccccgtcgtcgttgttgctggagccctccatgtccgcccgcctgcccgcgtcgccgctcggcctcgccatcgccctcgcgctttcctccgctgccatcccggccctggcccaggacgccaccaacctggacaccgtgatcgtcaccggcacccgcgccgccgatcgcaccgtgctcgaatccacctcgccggtggatgtgctcaccgccgaggacatccgcaaggccggcgtggtcaacggtgaactgggcagcgcgctgcaggcgctgctgccgtcgttcaacttcccgcgccaatccaactccggtggcgccgaccacgtacgcgccgcacagttgcgtggcctgtcccccgaccaggtgctggtgctggtcaacggcaagcgccgccaccacaccgcgctggtcaacaccgacagcaagatcggcaagggcaccaccccggtcgatttcaatgcgatcccggtcagcgcgatcaagcgcatcgaagtgctgcgcgacggtgccggtgcgctttacggctcggacgccgtggccggcgtgatcaacgtgatcctcgacaacggcggcgacggcggcgagatcgaggccagctacggtgccaaccacaccgacctcaagccgatcggccgcaccctcaccgatggccagaccggcaacatcagcgccaaggtcggcacttcgctgggcgaagacggcggcttcctgcgcgtcggcctggaatacaagcaccgcaacggcaccaaccgcgctggctttgaccagattccaccgtgggaccagacgccggacaacctggcgctgcagggcaagcgcaactatgtgctgggcgatggcaagagcaaggacatcaacctgtggctgaacaccgagattccggtgggccagacctcgacgttctacgcgttcggcaccttcaaccagcgcgacaccgaaggcgccaactacttccgctatcccgatggcgatgccaactggaagcaggtctatccgaacggataccgaccgatctccgaaggcgagaaccgcgacgtacaggccgtggccggcgtgcgcggccagtggggcgagtggagctacgacagcagcctggattacggccagaacgacttcacctaccgcctgcgtgagtcgctcaacgcgtcgctgggcccgaccagcccgacccgcttcaagaccgccgactacgagtacgcgcagaccgtgggcaacctcgatctgagccgcgtgttcacccagagcgacagcatcagccacacgctgggcctgggcgtggaagcgcgccatgagcgctaccagacccgccccggcgacccggccagctatgcggcgggcccgtacaccgaccgcccgaccggctcgcaggccggtggcggcctgaccccacaggacgccgccaccctgtcgcgcgacgtggccagcgcctatgccagcctgtccagccagttcggcgagaagttctccaccgacctggccgcgcgctacgagcacaacgacgactttggcggcgaactgaccggcaagctcggcctgcgctacgaattcaccccggcgttcgcactgcgcggtgccatctccaacaatttccgcgctccgtcgctggcgcagatcggctacgaatccacctccaccggctacaacgccggcggccagctggtgcagggccggctgctgtcggtcaacaatccgatcgcgcgtggcctgggtgcgcagaacctgaagccggagaagtcgatcaacacctcgctgggcttcaccagccgcatcggcgagcatttcgacctgtcgctggacttcttccagatcgatatcgacgaccgcatcgcgctgtcggagagcatcaccggcgatgcgctgaccgattacgtggccgccagctacggcgtcagtggcctgcagagcgccagcttcttcgtcaatgccgccgatacccgcacccgtggcgccgagctggtaagcaactggcggcagtcgctgggcggtggccagctgctgctgaccggcacctacgcctacaccaagaccacgctgaagaatgtgctggccacgccggcgcagctgagcgcgctgaacccggactacgtactgttcggcatcgaggagaccaacaccctgaccgatgccaccccgcgcacgcgtggcagcttctcggccgcctggagcaacgacaactggtcgctgagcacccgcgtgaaccgttacggcagcgccacccgggtgttcaacttcggtgatggctacatcccgcgccagacctaccaggccgaatggcagctggatgccgaagtcgagtaccgcatcaccccgcaatggagcgtggcgatcggtggccagaacctgaccgacaactacccggatcgatccaacagcgatatccactacttcggcaacctgccgtacgacgtgctgtcgccgatcggcagcaacggcgcgtactactacggccgcgtccgctatacgttctgatcgcattgggtgggtgcggaccgttggtccgcacaacacggtagtgccggccgctggccggcaacttcgtgatccgggtgcggatctgctttgggtgggggcggaccgttggtccgcgctgtttgggctggatgcaggctgacctgccgtgccgaccaacggtcggcacccaccgaagctgatccgcagcctgccctcgaccccacgtacacgcccaggctggcaggctggtcgtcatggctgaaccgctccccctgcgtccgccaccgccattgctggacgacgcctgtgcgttgttcctcgatgtcgatggcaccctcatcgaattcgctgcacgaccggatgccgtgcagctcctgccggatgtgcgcgaagccatcggccgcatcagtgaccgcctggaaggcgccgtggcactggtcagtggccgaccgcttgaacagctggaccagctgttcgctcccctccagctgcctgccgccggcctgcatgggcacgaactgcgcggcgaggacggtcgtgtgctgcgagacgagcacgacgacgacaccgccgagtggctgcacgcgctgcaccagcaggcgatgcgctttgcccacggccatcccggcgtgctggtggaagacaagggcgtcggcctggccctgcattggcgcggtgcgccgcacgcggcaagtgatgtgcgcgccttcgccgatcgccacgtgcggggccgcgccagttaccgcctgcaacccggcgaccatgtggtcgagttcgtgcccgtcggcaccgacaagggccgtgccgtgcgccggatgatgcagtacctgcccttccgcggccgcctgccggtgtttctcggtgacgacctcaccgatgaattcggcttcgacgccgccaacagccagcatggctggagcgtgctggtgggtgaacgtgaacccagcgcggcggtgttcgcgctgcccgacatacgcagcgtgcacgcctggctgcgtgagaatgcctattgacccggccaacccccacggccgcaaccgagatgtaccgcgtgatgacccaacccgatcttgatctgggcgtggtcggcaacggcagcttcggcgccctggtcgacaaacgtgcccgcgttgtctggagctgcctgcccaccttcgacggcgaccctaccttctgtgcgctgctcggccccaaccagcagaccggtggcgacttcgccatcgagctggaagacttcgccagcagcgagcaggaatacctcaccaacacggcgatcctgcgcacggtgctccgcgacgcgcacggcggcgaactggaaatcctggatttcgccccccgctggcggcagaacgaccgcttctaccggccggtcagcctgatccgccaggtgcgtccgctggctggcagcccgcgcatcaccgtgcgtgcgcgcccgctggccgactggggcgcacgcgtgccagagtcgacctggggcagcaaccatgtgcgctggatcctgccggagcacgtgctgcggctgaccaccgatgtgccggtgcgcttcgtgcgcgacggcctgccgttcgtgctcaaccatcccatccacctgatcctgggcgtggatgagtcactcaaccggtcgatcagcggctacgtgcaggaagccttccagcgcacccgcgactactggcgcgaatgggtgcgctacctgtccattccactggagtggcaggacgcggtcatccgcagtgcgatcacgttgaagctgtgccagtacgaggacagcggcgcgatcatcgcggcgatgaccacctccattccggaagcacccggcagcgtgcgcaactgggactaccgctactgctggctgcgtgacgcagctttcgtggtgcgtgcactgaaccgtctcggcgcaacgcgcacgatggaacagttcctcggctacatcttcaacctggccaccaccgacggcacgctgcagccgctgtatggcatcggctttgaagccaagctggacgaggacgaagtgcccagcctgtccggctaccgcggcatgggcccggtgcgccgtggcaatctggcctgggtgcagcgccagcatgatgtctacggcagcgtggtgctggcctccacgcagctgttcttcgaccgccgcctgcaggatcccggcgacgcgcacacattcgcccgcctcgaaccgctgggcgaacaggccttcgccctgcatgacgtgcccgatgcgggcctgtgggagttccgtggccgcaccgaggtacacacctacaccagcgcgatgtgctgggccgcctgcgaccgcctgtgcaagatcgccgtgcgcctgaagcgcgatgaccgtgcacactactggcgcgagcgcgccgacaccatccatgcgcgcatcatggccgagtcctggaatgaggaactgggccacttcaccgataccttcggcggccatcgcctggacgcctcgctcctgctgctggccgacatcggcttcatcgatgcgatggacgcccgcttcatcgccaccgtcgatgcgatcggccgcgacctcaagcatggcaattcgctgtaccgctatgtcgcgccggatgacttcggtgagccggaaaccagcttcaccatctgcacgttctggtacatcgatgcgctggcggcgatcgggcgcatggacgaggcgcgcgagatgttcgagctgctgctgaagcagcgcaaccacctgggcctgctgtcggaggatctggccttcgacagcggcgaggcctggggcaatttcccgcagacctattcgcacgtcggcctgatcactgccgcgatgcgcctgtcgcggtcctggcaggaggcatcgtgagtcgtctggtggtggtttcaaatcgtgtggccgtacccggcgagaaccgcgccggcggcctggctgtcggcctgctggccgccctgaaggaacgcggcggcctgtggttcggctggagcggcaagacggtaaaggacggcagcggcacgctgcaccggcagaaagacggtgacatcgactacgtcaccatggacctgagcaagcgcgaggtggacggctactacaacggctttgccaaccgcacgctgtggccgctgctgcacttccgcctggatctggtcgactacgaccgtgccacccgcgagacctaccacaaggtcaacgcactgttcgccgacaagctcgcgcccttgctgcgcgaggatgacatcgtctggatccacgactatcacctgatcccgcttggcgcactgctgcgcgagcgtggcatcggctgccgcatcggcttcttcctgcacatcccgatgccctcggccgacctgctgcaggcgatgcccgaccacctgcggctgttctccgcgctctacgcgtatgacctggtgggcttccagacccagcgcgatgccgatcgcttccagacctacctgcgcctgttcggcggcggtcgggtactcgccaacggcgagctggaggcaccgggcgggcgtcgtttccgcgcggcggcgttcccgatcggcatcgacaccgagctgatcgcgcgccaggccggtaccgccgccaccaaggccgccgtaaagaacctgcgcgccagcctgcgtgatcgccaactggcgatcggcgttgatcgcctggattattccaagggcctgcccgagcgcttcctcggcttcgaacgctatcttgagcgccatcccgaccagcgcgggtcgctgacctacctgcagatcgcccccgtctcgcgcggcgatgtcaccgagtaccggcagctgcgcagccagctggagcagatcgccggccacatcaacggtggccacgccgagccggactggacgccgctgcgctacgtcaaccagaacttcacccatgccaccctcaccggtttctaccgtgcagcggcggtggggctggtcacgccgctgcgtgatggcatgaacctggtggccaaggaatacgtggcctcgcaggacccggaggacccgggcgtgctggtgctgtcgctgctggccggcgccgccgacgaactcaagcaggcactgctggtgaacccgcacgacctggatggcgttgccgacgccatcgccaccgcggcgacgatgtcgctgcgcaagcgcaaggagcgctggcacgccatgatggagcacctgcgcacctacgacatcaaccactggcggcgcagctacctggacgcactggaaggctgaggaaaaaggggacggaggggattaagtcgtttgtgcacaaacgacttaatcccctccgtcccctttttcttcaatccaggaatcgcgctgcctgctccggtgcgggcagatgacaggcatcatgccgcccgaaccagcggtagcggttgcgggccagcgcgcgatacgcggcatcccgccagccgcgcggcagcaccttcagtacgccgctcaggcgccatccaccgcccagcccggccagtacacgcaggatggcatcggtatcggtccaggtgccctgcgcgtccagcagcaggaacgacgccgggtcctgcgggtccagcccgtgtgcgcgcagcagcgcactgccccgctcgccctgcatcgctgcaaagcgataacgttccttgcggtcgaaatgcagcaggaagcgcacccagcgattgcacagagcgcatacgccgtcgaacacgatcaccgcgctgccagtcccggcggcgccgtcactgtggttcgagccagccttcatagcggatcagggctcccacccaaggcaacctcacatcaacccggaaagtgtaacgctcgccgcgccaggcttcacggcagcgcacaccgccgaaccaacgcgtcggcagcggcagcagcccgaacgcccagacccgccgcaccgaccagtcgatgccaccctcgcgggcctgcaacgcgaactcgaagcgcaccgcgcccagctgctcgcgcagaagcccttcgtgcgcccacagccgcgacaccatcggccagcggtcgaaccgtcgcgcccactgctcgccctgcccgcgtgcactgaacgccacttcggtgggcagcgcgtcgccgtccttcggcagccgcgccaacgcggccagcagcggcaccagccagtgccgccccctcacgatgcgcgcctgccccatgtagcggcagggcaacggcgcggcatgcagcgcctgcaccggcgctgccagggtggcgaaggccggccccagcacgcgcgcgaacagcggcgtggtcagggcgcgatccaggccagggtcgccatgcgcccggtacgacggtcgcgccggtgcgaatacaggtcaggatcggccatggtcgacaccgtgccgccatacacctgcgccgggtccatccccgccgcctgcaaccgctgccgcgccagcgcgaacaggtccactttccagtggcctgcgcgggtggccacgaacgccgccccggcggccggatcatggccgacgaaggcgtggtagacctcctcgccgatctcgtagtcggccggcccggcagccgggcccagccaggcccgcaactgcgccggcggcgtctgcagggcggccaccgtggcctccagcatgccgtcagccagcccacgccagccggcatgggccgcacccacctcgctgccatcggccgcggcaaacaccaccggcaggcagtcggcggtcaggatcgccagcaccacgcccggcaccgaggtcactgcggcgtcggccaccggttcgctggcgcggggcaccggcggcgcggtgaagcgcagcacggtgctgctgtgcacctggcgcagccagtgcggtgccgagggcagtgccagcccctcctgcagcagctggcggttgtgctccacgttggccggggtatcaccatcggccgcgtgccggttgccgaggttgaactgcgcgaacggcgccggcgaaatgcccgcgccatgccggcgcgtggtcagcgcatggacgcctgccggcgccggccagtccgcctgcagcaacggcagcgcggcggccatcaccagcgatcccgctcgcgggcggcgaaggcttcgctgtcttcgcgcagcaccttcatcaggtgcagcatgtcctccggcaccggcgcggtattgcgcaccggctcaccggtgatcggatgcatgaactccagggtctcggcgtgcaaggcttggcgcttgaagccgcgcagcgcggccaccagctcgtcgctggcacccttgggcagcttcagcgcaccgccgtacagcgggtcgccgatgatcggatggcgcacgtgtgccatgtgcacgcggatctggtgggtacggccggtttccaggcggcactccagcgcggtgtgcgcacggaagcgctcgcgcaggcgatagtgggtcaccgcttccttgccgtcttcgcgcaccgccatcttcagccggtcgcgcgggtggcggtcgatcggggcatcggcggtaccgcctgccaccagcgcgcccatcacgatggccaggtactggcggtgcacgtcacgggccgccagttgctcgaccaatgcagtctgcgcttccagggtcttggccaccaccatcacgccgctggtgtccttgtccaggcggtgcacgatgcccgcgcgcggcagcaccgccaccgaggggtcgcggaacagcagcgcgttgaccaaggtgccgctgtggttgccggcgccggggtggaccaccaggccgaccggcttgttgatcaccagcacatgctcgtcctcgaacagcacgtccagcgggatgtcctccggctgggcgtcggtctgggtttccagcaccacgtggagggtcaccacctcgccgccgcgcagcggatcgcgcgggcgcacctgggcgccgtccagcaggacgtcaccggacttgatccactcggtcaggcgcgaacgcgaatattcggggaacagttcggccacgacggcatcgaaacgacggccggcagcggtgtcggggacgatggcctggcgggccgattcagagggttgttcagacatggcagggggcattctttgaaattttggggtcccggcggccggtttcagtcgctggacaggacactaggctatcatcgacccttcgtattccagccgcgtcccgcctcgaccccatgatccgacgctccgccatgctctccgcgcccgtccgcctcaccgccctgctgctggtgctggtcatcgccgcaaccggctgccaccgcggcgccaagaagggtgatcgccccgacgaaggcgtgccggtcgaacagctgtacgagaaaagccacaagctgatgcagggcggcaactggagcggcgccgaagccagcttccgccgcctggtggcccagtatccgtacggcccgtacaccgagcaggcgatgatcgaaaccgcctacgcccagtacaaggccggcaagcacgatgacgcggtgtccagcatcgaccgcttcatccgcacctacccgacgcaccgcaacatcgcctacctgtactacctgcgcggcctggccaattccaaccgcagtacggttttcctgcgccgcgtatggtcgctggatgccagccgccgcgacctgtccacgccgcaccaggcgtactcggacttcaacatcgtggttgatcgttacccgaacagccgctacgccgccgatgcgcgccagcgcatgctggagctgcgtgacgtgttcgcccagcacgagctggacaacgccctgtactacatgcgccgcggcgcctgggtctcggccgtgggccgcgccaactacctgctggaaacctacccgcagagcgccttccagtacgacgccgtggccgtgctggccgattcctacacccacctgggcaacaagaccctggccgacgacgcccgtcgcgtcctgcagctgaaccagccggatcacccgtggctggaaggcaagtggccgaagtacccgtggatgatccgcaagctgaacccgttcgccggcgagaagtccgccagcacgggccagcgcaacgcgcgactggagaagaagtaagagagggccccgaaaggggcccttcttctttgtggagtcgagccacgctcgactgctttcctcatccgcctccccgcgccggggccggcacctaggaatgctacgaatccagcgcggatgcgacgccggtcgcagcccgcctgggcgaggcgctccacactgcggcgcaacggccacaccggccatcacggagcgtcccatggccccactgcgctgcagtttccgtcccctgtcctgcctcatcgccaccgccctgctggcgctgtccccgcgccccctggctgctgcaccggacgcgccgggcgatctgctgtctgctgccccctatcgcgcgtcatgggtgccgtcgaaggccgcgcaggcctataagctgcactaccgcaccccggaccaccgcggccagctggccgaaggcaccggcctgctgtacctgcccgccggcgcggcgcctgcgggcgggtggccggtggtgtcctgggcacatggcacccagggcattgcggatcgctgtgcgccctcggtctccggccccacccatgccgaacgcgacggacgcttcctggacgtgttcctggcccagggctatgccgtcgccgccgccgactaccagggcctgggcagcccaggcaatcatgcctacctgcacgtgcgtaccgcggcgcgcaacgccatcgacatggtcaaggccagccgccagtacctgggtacggcaacattgtcgccgcgctgggtctcggtcggatattcgcaggggggcgcggccgcattgacagcaggccatctggccgcctcccatggcgggccctcactgcagtaccgcggcagtttcaccgccggaacgcccaccgcagtcgaactgaccgcgctggtgatgaatcccggcaaccgcaccgccaatcctggcgcacccaacgcatatcacgcgtatctgctcgacggcctgctgcaggccgcgcctcagatcgaccgcgtcctcagcgacgcaggccgtgcccgtgtggcagtggcccgcgagcagtgcctgagcgaactgaccgccacgctggacggcgccgatacaggcagcatgtttactgcaccactgaccagcgtgccgggcatctgggcggtgctgcatgactatctgggtgtaccgcgccgcggcttcagccagccgctgatgctggcccatggcagcgaggaccgcgatgtgccctatctgaccaccctgctgtacgccgtaggcctcgccgggcgaggcgagccggtcgcgttccggcgctacccggtcgatcatcgcggcacgctggatgcggcggcggcggatgccctggcgttcgtgcgtgcacgactggagggcgaccacttcaacgacgctgcggagatcgcaggcctcgaacaacggctcgacgaagcccggtagatccacgccatgccggatacgcgatccaggaagttgccggccagcggccggcactaccgaatgcagtagatccacgccatgcgtggatacgcgctatagggcgttgccggccagcggccggcactacctgccaaccgctgcctcagcccttgtagccgttgctgatcgggtaacgacgctcgcggccaaaggcgcggcgcgagaccttcggccccggcgcggcctggtgccgcttccactcgctgatgcgcaccagccgcagcacgcggtcgaccacggccgcgtcatagccggccgccacgatctccgtgcgcgactgctcttggtcgatgtagcggtacaggatgccgtccagcacgtcataagccggcaatgaatcctggtccagctggttctcgcgcagctcggccgacggcgggcggctgatcaccgccggcgggatcaccggcgcgccgcccacggtattgcgccacttggacaggccgaacacttcggtcttgtacaggtccttcagcggcgcatagccaccgcacatgtcgccgtagatggtggcgtagccgaccgcatactcgctcttgttgccggtggtcagcagcaggccaccgaacttgttggccagcgccatcaggatcacgccacggctgcgcgactgcaggttctcttcggtcacgtccggcgcggtgccctcgaacatcggcgccaacgcttccatcaggcccttgaacgccggctcgatcgacaccgcctccagcttcacgcccagcgcctggcactgctcggccgccaggtcgttggacaggcccgcggtgtagcgcgacggcaggcgcacggcggttacgttctccgcgcccatcgcgtccaccgccatggccagcacgatcgccgagtcgatgccgccggacaggcccagccacactttcttgaagccgttcttgcggcagtagtcctggatgccacgggtcaccgcgcgccaggccagcgcgtccatgctctcgtcgccgtcgtccatccacacgtgcggcatgaagcggcggctggcgccgtcgtactccaccaccagccactggtcgacgaaggcagcagcggccgggtgcaccgtgccatcaccgtcggccaccaccgaggcgccatcgaacaccagcgcgtcctggccgccaaccacgttgaggtaagcgatcgccgccccgctctcgcgggtacgtgcagccagcacggcgtcgcgctgggcatgcttgccacgctcgtacggcgaagcattcggcaccaccaccagctgcgcaccggcgcgcatggtgtcggccagcggctcggcaaaccacaggtcctcgcagatcagcaggccaaccggaataccgttgacctcgaacacgcagctgccgccatccggatcgacatcgaagtagcggcgctcgtcgaacacggcgtagttgggcagctcacgcttgcggtaggtctgctcgaccaggccatcacgcagcacgctggcggcgttgtagaccaccgcgccagccgcctgcggccagccgaccacggcggtgatgccgcggcaggcggcagcgatgcgggccatcgcctgctcgcactcgtacaggaagcccgggcgcagcagcaggtcttccggcgggtagccgctcaccgccagctcggggaacatcaccagctcggcgccgtactcgtcgcgcgcctggccgatcatctcgatgatgcgctcggtgttgccggcgacatcgccgaccgggaagtcgaactgcgccatcgcgatgcggatcgaagccatgggattccagcctgtggttgcaatgccgccattgtaacgccggggtcagatccgttttgcgcagcaaaagggatctggccccacgccagacgcagaaaggccgcccggaggcggcctttctgtgttcaagcagccggccagcggccggctctacagcatcgtctgccggaggcagtcgatcttatttcaccagcttagcgatggcagcgcccaggtcgcccggcgagcggacggtgacaacaccggcagcttccatggcggcgaacttgccttcggcagtgcccttgccgcccgaggcgatcgcaccggcgtggcccatgcgcttgccggccggagccgacgcaccggcgatgaaaccgacgaccggcttcttcacgtggttcttgatgtactcggcgccggcttcctcggcgtcgccgccgatttcgccaaccatgatgatgccttcagtctgcgggtcttcgttgaacagcttcaggcagtcgacgaagttcaggccgttgatcgggtcaccaccgatgccgatgcaggtggactggcccaggccgacttcggtggtctgcttgaccgcttcataggtcagggtgcccgaacgcgacacgataccgatcttgcccggctggtggatgtggcccggcatgatgccgatcttgcactcacccggggtgatgacgcccgggcagttcggcccgatcagcacggtgtccggatgcgaacgggtcagcacgttcttgacgcgcagcatgtccagcaccgggatgccttcggtgatgcagacgatgaccttgatgccggcagcagcggcttccaggatcgcgtcggccgcgtacggcggcggcacgtagatgaccgaagcgttggcgccggtgctctgcacggcgtcggcaacggtgttgaagaccggcaggtcgatgtgggtggtgccacccttgcccggggtcacgccgccaacaacctgggtgccgtactcgatcatctgagtggcgtggaaggtgccctgctggccggtgaagccctgcacgatcaccttggtgttcttgttaatcaaaacagacatgggaattccttggtgtcgaatcaggcagcgttcttgacagcttcaacgatcttcttggcgccatcgttgatgttgtcagccgggatgatggccatgccgctgtcgcgcagcagctgcttgccttcttccacgttggtgccttccaggcgcaccacgaccggaaccttgacgcccacttccttcacggcggcgatgatgccttcggcaatcatgtcgcagcggacgatgccgccgaagatgttgacgaagatgccttcaaccttgtccgaggacaggatcagcttgaacgcttcgatgacgcgctgcttgttggcaccgccgcccacgtccaggaagttcgccggctcgccgccgttgagcttgatgacgtccatggtggccatggccaggccggcgccgttcaccatgcagccgatgttgccgtccatggtgacgtagttgatgtccagctccgaagcgatcacttcggtcggatcttcctgggtcttgtcgcgcatggcgaccagggccttctggcggaacgcggcgttgtcgtcgctgtcgaacttgccgtccagcgcgtacaggttgccgtcgtccaggatggccagcgggttgatttcaaccagggccaggtccttttcgttgaacaggcggtacaggttcaccatgatgctggcgaactggccggcctgcttggcagtcaggcccagcttgaagccgaaatcacggccgtggtaaccctgcacgccttcgacgaaatcgacgttcagcgagtggatcagctccggggtttcagcagcgacctgctcgatttccacgccgccttccgaagaggcgatgtaggtgatggtcttggtgccacggtcgaccagcaccgacaggtacagttccttgacgatctcgccggcggtggtcaccagcaccaggttgaccggcagttcaacgcctgcggtctggtaggtggccatcttggtgccgagcatcttggccgcagcggccttcacgtcgtcggtggtcttgcagaacttgacgccgccagccttgccgcggccgccagcgtggatctgcgccttgaccatccaggggccctggcccagggagttggcagcggcaaccgcttcgtccggggtcgcagcgaccttgccggccgggaccgggatgccgtactcggcaagcagttgttttgactggtattcgtggaaattcatgcgtcaccgtgggaataggaacgaccgcacgcaattcctcagggccccggcggggcgccggcatggaccgcggcgggcccactattgtggccgagccggcgccggggcgcaaagaagtctgtacaaaacgccagacgcggccagatttccgccgtcattcaggtagttgcgcccggcggcccactggccaccggtatccatcccgggccaaatgcgcgatccgggcggctccggcggcgccctgcctggggccctatactggccgaccaaggtgtgtagagtcgggcttgccctgctgcttccaccgcaggccacatcgaagcgacgtgcccgcccggcctcaggggacgccgggcaggcctgccgcagattccagactcaggcagccagaaggggagttccggcgtgtcacccagtgcttcattgatcgaccgcatcgaatcgattccgcggcgtgagctgtatttcttcgcgctgtaccgggtgctgatcgcctcggtcatcgccgccctgctctacagcccgctgtcggccatggtcggcgaagcccaccacccgcggctggccgacaccgtcgccgccatctacctggtgctgtccctgctggccctggtgatcggccgcaacgaacgctggctgcgcccgatcgtggtcagcggcgtgctggtggatatcgtcgccgccaccctgttgtcgcatgccctgcccggtgccagcgccggcatctcgatgtcgctgctgttcaacatcgccgccgccgccaccctgctgccgctcagcctggggctgggcctggccctggccgccagcctcgccaccggcgtggagtacacctggaagctgctggaaggcggcgaccccacccgtaccctggccgaactggccatgttcgccaccagctacctggcactggccttcatcagttaccaggtcggcagccgcgcgcgccgcaaccagcagctggccaaccagcgcggcgatgaagtggccaacctgttccagatcaacgagctgatcatccgccgcatgcgtaccggcgtgctggtggtcgacgccgacaaccgcgtcaccctggccaacgaggccgcctcgatgctgctcggtgacagtgatggcagcggcgaaagcggccgcctggacctggccagcgccgccccggaactcgcccgtcgcctgcagcgctggcgcaatggctgggcgcaggacgaactaccgctgcagctcaaccccgaccagcccgaagtgcagccgcgctttgcccgcctgctggccggcagcgacctggccctggtgttcctggacgactccagcgtggtctcgcgccgcgccgaatcgctcaccctgtcggcgatgggccgcttctcggccagcctcgcccacgagatccgcaacccactggccgcgatcaactacgcggtgcagctgctggaagaaggcaccggcttcaacgaaagcgaccgccgcctgctgcagatcatccgccagcagtgccagcgcaccaacggcatcgtcgaaagcgtgctgggcctggcccggcgcgagcgcgccacgccggagaacgtcgacctggccgccttcgtgcgccgcttcgtgctggagtacaagcagggccagacgctggagaccgacagcatcgagccgatcatcaacgacacctcggtgctggcccaggtcgacaccaagcacctctaccaggtgctgaccgtactggtgcacaacgcgctcaaatatggccgcatcggccagcagccggcgcgggtgcgcctgcgcgtggcgcagcacgagcgcagtgcggtcatcgacgtgatggatcgcggccccggtattcccgagagtgtggccgcacagttgttccggccgttcttcaccacgtccgagcatggcaccgggctgggcctgtatatcgcccgcgagctgtgccgggccaaccaggcgcggctggactacatcccggttcccgctggaggctcctgcttccgcctggtgctgcccggcccgcatacgctgttgcccacctgatctcgattctgtgcgtcaaacatttgtcgcttccagccccctcgtttatctttcacgcccatgaacgaaacccgcagcgccctcgtcgtcgacgacgaacgcgacatccgcgaactgctggtactgacgctcggccgcatggggctgcgcatcagtacggcagccaaccttgccgaagcgcgcgaactgcttgccagcaatccgtacgacctgtgcatcaccgacatgcgcctgccggacggcaatggcatcgagctggtcagcgagatcgcgcagcactacccgcgcacgccagtggcgatgatcaccgccttcggcagcatggacctggccgtggaagcgctgaaggccggcgccttcgacttcgtcagcaagccggtggatatcgccgtgctgcgcggcctggtcaagcacgcgctggaactgaacaacaccgagcgccctgcacccggccccgccgccgaacagggcgcacgcctgctgggcgattcgccggccatggacgtgctgcgcaccaccatcggcaaggtcgcgcgcagccaggcgccggtctacatcctcggcgaatccggcgtgggcaaggagctggtcgcacgaaccatccacgcccagggcgcccgcgcggccggcccgttcgtgccggtcaactgcggcgccattcccggcgagctgatggaaagcgaattcttcggccaccgcaagggcagcttcagcggcgcccacgccgacaagcccgggctgttccaggccgcgcatggcggcaccctgttcctcgacgaagtggccgagctgccgctgcagatgcaggtgaagctgctgcgcgcgatccaggaaaaatcagtgcgcgcggtgggcgcggctaccgaggagccggtggacgtgcgcatcctctcggccacccacaaggacctggccgagctggtcgaggacgggcgcttccgccacgacctctactaccgcatcaacgtgatcgaactgagggtgccgccgctgcgcgagcgtcgccaggacctgccggaactggccgcatcggtactggcacggctggcccgcagccatggccgcccgacgccgttgctggcgccgtcggcgctggacgcactggcccagtacgccttccctggcaacgtgcgcgaattggagaacatcctggaacgcgcgctggccctggccgaagaagaccgcatcggcgccgacgacctgcgcctgccgcagcatgccccgcgcacgcccggcagcgcagcacacgccgaggccgtggtggacctgcagcccggcagcgccgccctgccctcgtacatcgaacagctcgagcgcagcgccatccagcgcgcgctggaagagaaccgctggaacaagacccgcaccgccgcgcagctgggcatcaccttccgcgcgctgcgctacaagctgaagaagctggggatggagtaaggagggcccgacgcgggccaccccatccacgcacgacgcagatctactgtagagccgagcccacgctcggctgctcttcgaaccatcagccgagcataggctcggctctacctcaatccttggtaacgcggttgatctcggccaggctggtgacacccgccgccgccttcttcaacgccgactggcgcagatcgttcaccccgatctgctgtgcggcctcggcaatctgcaacgcattgccaccggccagcacgatcgtggcgatctcgtcggtcatcggcatcacctggtagataccggtgcggcccttgtagccctcggtgcattcgtcacagccgaccgcctcgtacagctcgatacccgcatccagctgcgcctgggtaaagccttcagccagcagcgcgtgctctggcaggttggccgggcgcttgcagttgttgcacaaccggcgcgccaggcgctgggcgatcaccagcgtcaccgagctggtgatgttgtacggcgcgatgcccatgttcatcaggcgcgcgatggtctgcggtgcatcgttggtgtgcagcgtggacagcaccatgtggccggtctgcgccgccttgatcgcgatctcggccgtctccaggtcgcggatttcgccgaccatgatgatgtccggatcctgtcgcaggaacgagcgcagtgccgcggcgaaggtcatgccgcgcttgttgttctgctgcacctggttgacgccgggcagacggatttccaccgggtcttcggcggtggagatgttgcgcgtctcgtcgttaaggatgcccagcgcggtatacagcgacaccgtcttgcccgaaccggtcgggccggtcaccagcaccatgccgtagggcttgtggatggcgtccaggaacagcttctgctggtccggctcgtaacccagcttgtcgatgcccagcttggccgcgctgccgtccaggatacgcagcaccaccttctcgccgaacagggtcggcagcgtgctaacgcggaagtcgatctgcttggtcttggagaggttgagcttgatgcgtccgtcctgcggcacgcgcttctcggcgatgtccagctgcgccatcaccttcaggcgcgcggcgatgcgctggttcagcttcaccggcgcgcgcgcgaccatcttcagcaggccatcgatgcgcaggcgcacgcgatagtcgtcttcatagggctcgaagtggatgtccgaggcgcccttgcggatcgcgtccaccagtaccttgttgacgaacttcaccaccggggtgtcatcacccttggcatcgatgccggagtcgccaccggcgccgagatcctcgtctccggccgcaacatccaggttgcccatgccatcgtcgtcaccgcccagcgcgtcgcccagcgtgtcatggctggcatgccactgctcgagcgtgcggcggatctggtcttcatcgaccaggatcggctccaccaccagattggtgtggaacttgatctcgtccagcgaatgggtcggattgctggtacccacgaacagcttgccgccgcgcttgaacagcggcagcacgttgtgcttgcgcagcagctcctcgctgaccaggctcatcgcgttctggctggcgtcgaacgtggacacgtcgaacagcggcatgccgaactcgaccgcgttggccgccgccaactgggccgccccgaccaccttgttctgcgcgaaccaggtcggcagcggctgccgggccgcagcggccttggccatggcgtcgcgggcggaagcctcgtccagcgcaccatcctggaccaggcgacgggccaggccggtgatgccgacgagattggcggtggttacggcgttcatatggatccttggctcatcatgggtcaggcagtgcggcgcgccttccagaggcaccgcacagggcagcagaacctgccgcgacccgatggccgacgacgacgccaatccttcagcatgactgcctcgcccggcactcccagcccggcaggcacgatcctgactcccccggggatgatagccccgtcaacggcccgccaacatcccattggcaggccgaagtgtgatcaacagccggttgggcgatagcgcgcttcgaaggcgctgccgtcgcaggtccagatgccgtcggctgcgcggcggaggatgaggtctttgccggcaaccagagaattaccacccacagtacaagcgatttcggccactccattaccggcgagctcggcacgcacagcagtgcagcgtccagatactcggatcccgacatatgcggcgttcaccaacaccggactgcgtccatcctgtacgacagcctcaattgtggtcttgccgggccgaatctcagccaacccggccacaagctgtgacttcgcgacaaatccttgataaatcgacatcgcgattgctgaaatgatggcaataatcgctacgacgatcatcaattcaatcaagctaaatcccctttgtttacgcatcgccgctcccctcgagcagatcaaagtacggtcgcgcaatcactctgatgagtccccataaacaagaagccccgcattcgcgaggcttcttggcatacacaaagggctaaaactaattaggaacccttggtgcagccaaccgggtagtacttgtcatcagcaacagtggtgttgcaagtccaggtaccgtcagcggcgcgcttccaagtgatattgccagccgccttcggactgcccttgatggaggtgcaggcaatcgagccttcggcaccggcaacgatcgtgaagctcgtgcaacgggtggtcggtgcagccggcagacccagcttggtcgcagtgaagtcggcatcagccttgccttcattcacgaagatctcgaactgcgtcttgccaggggtgacttcggcaagtgcagcagtgacctgcgacttggccacatagtcctggtacatcggcagggcgatggcggccaggatggcgatgatcgcaacgacgatcatcagttcgataagggtgaagcccttctggttcttcattttggtacatccccaagataagtggtggttgatttcagagcacaggatcggtctgaccagcggtcagctgagcgggtcctgccccctgcgggtggatcaacgcaggttgcgtgccaacgccggcacgcctccccctggatttccccgcacccatgatggcagctatttcacggatgggaaccccctgaatgcgaatctgcgatggacgcggcaatgtgacgcagtgcgtcacctttggccggcacccggcacgaattcgcatcatggggcccctggcaactgcccatacgtgcatgaacccgctaccatcaacggctagacgcccgcctggggatggcgggtcttggggagccgatatgtctgtcagtcgcagtgcgatcaagaaggagcccgtggcgcgcagcaccacggagctgcagccgtttgtctgggtggggaccgacaagcggggcgtgaagatgaaaggggagcaggtcgcaaagaacgcgaacctgctgcgggctgaactgcgccgccaaggcatcaaccccggcttggtcaagcccaagccaaagccgttgttcggcgccgccggcagcaaggtcactccgaaggacatcgcgttcttcagtcggcagatggctaccatgatgaaatcgggcgtgcccattgtcggcgcgctggacatcatcgccagcgggcacaagaacccgcgcatgaaaaagatggtggattcggttcgaaccgatatcgagggcggctcgtcgctgtacgaggcggtcagtaagcatccggtgcagttcgacgagctctaccgcaatctggtcaaggctggcgaaggcgccggtgtactcgagacggtgctggatactgtcgccacctacaaggagaacatcgaagccctcaagggcaagatcaagaaggcgatgttctatcccgccatggtgctggcggtcgctctgctggtcagcggcattctgctggtctgggtggtaccgcagttcgaggatgtattcaaaggcttcggcgcggagcttcctgccttcacccaaatgatcgtcggcctatcccgcttcatggtgtcatggtggtggctgatcttgatcatgatcatcggctcgattgtcggcttcattgcggcttacaagcgatcaccgaaactgcaacactctatcgaccgtttggttctgaaggtgccggtcatcgggcagatcatgcacaacagctcgattgcacgctttgcgcgtaccacggcggtgactttcaaggccggtgtgccacttgtggaagccttgggcatcgtggccggcgccaccggcaacacagtgtacgaagaggccgttctgcggatgcgcgacgacgtgtcggtcggctacccggtcaacatggccatgaaacagaccgccctgttcccgcacatggtcatccagatgaccggcatcggtgaagaggcgggcgccctggacgccatgctgttcaaggtggccgagtactatgagcaggaggtcaacaatgccgttgacgccctgagcagcctgctggaaccgatcatcatggtgatcattggtaccatcgtcggcggcatggtcatcggcatgtacctgccgatcttcaagctcgcttccgtcgtcggataatcactacatggcatttctcgaccagcatcccggcctcggctaccccgccgcggccgccctggggctgctgctgggcagtttcctcaacgtcgtcatcctgcgcctgcccaagcggctggagtggcagtggaagcgcgatgcgcgcgaggtcctggaggaaccggacttctacgagcccccgccaccggggatcgtggtcgagccctcgcactgcccgcactgcaagcacaagctgagctggtacgagaacatcccgctgttcagctggatcatccagggcggcaagtgccgccactgcaaggcgccgatctcgctgcagtatccgctggtcgaggccctgacctcggtgctggtgctggcctgcgtctggcagttcggcttcggctggcagggcttcggcgccattgtgctgacctgcttcctgatcgccttgtccggcatcgacctgcgcacccagctgctgcccgaccagttgaccctgccactgatgtggctgggcctgataggcaacatcgacaacctgtacatgccggccaagccagcattggtcggcgcggcggtgggctatctgtcactgtggatggtctggtggctgttcaagcagctgaccggcaaggaaggcatgggccacggcgatttcaagctgctggccgcgctcggcgcctggtgcgggttgaagggcatcctgccgatcatcctgctgtcgtcggtgctgggcgccatcatcggctcgatctggctgtacacccggggccgtgaccgcgccacgccgatcccgttcggcccctacctggccatcgcgggctggctgtacttcatgtggggcgcgcccgtggtggagcagtacctggtgttgagcggactgcgctgaggggaatccccatgagccgctatgtggttggcctgaccggcggcattgccgccggcaagagcgaggcgacccggcgcttcgaggcgctgggcatcgtggtggccgacgccgacctggccgcccgcgcggtggttgccgccggcagcccggccctggaccgtatcgccgagcgcttcggcgccggcatgctgcaggcggacggtagcttggaccgggcacgcctgcgggcccacgtgttcgccgacccgaccgaacgggcggcgctggaaacgatcacccacccggccatccgcctgctgatgcaacagcagtgcgagcaggccgccagcccctatgcgattgccgccattccgttgctgaccgaggtcggtgggcggcaggcctacccgtggttggaccgggtattgctggtggatgcgcccgaagccgtgcagcacgcccggctgatgcagcgcgacggcatcgacgccgcgctggccgacaagatgatcgccgcccaggccagccgcgcgcagcgcttggcactggccgatgatgtagtggtcaacgatggtcacccggaagagctgcaggcgcaggtggaagcgctgcatgagcggtatctggggctggctgggggttgaggcttggttgccggccagcggccggcactaccgaagcgcatccgcgcattgcggcgatttaccctgcaccagcgtggaactgctgtagagccgagcccacgctcggctgcgatcatcaagccgagcatgggctcggctctacaaagcgttctgcattcacgcgtggcgtggacctactccagctgcaggcgggcgtagcgggccagttcgcgggcgccgagcagcaggccgtcgacgacatccgggctcagctgctggtgggcaccgccctgttcgcgggcggcttcggcggcgtgcagcacctgcatgagtgcattcaagccggccagggtgcggctgagaccggccatggtggccgcctgggcagggctgaggccctgcgcttccagtcgccggccgtcggcggcatcgcggccgtccatgcgggccagcagcgcgggcagcagatccttcggatcatcgagcagggtttcgacacgctcggccacgtcggccggcagcaggtcagcggcttcgccgatcagtgcgtacagttgggggaacacggggcgtgcggacatggtgaatctcctcgcagacgacgagccacctgcggatgcgaggtggcggacggtgcgggttggcgtaccggagacccaacaactcaagcgcgaggaaaaagactccagcggattctgatgaatccccacgcaccatccgccgaaacgaggcaggcgatgcattttccatgatgagccgcagcacacccggagcgcttgagttgaaggtttttttcaggacgccaatcccggccaaggcacctgccccggcagccccatctggccatcacgcagcgctgtgatctgtaaggaaattctcaagccgcggcggagggtacgaatgcgtgcatgcggacacgcacgcgacgtggcggcgatcacggtgatgtcgccattagccccaaggcccgctcatcacccctaaatattcagcaccagaagcgacacgccgccgactctacccttcgctatcgacagaacttcatttcagccaaaggaacttcacatcttgcgccacccagttgcagacgctaattccacggcaagacggcccactgcagacatgtcatccccctcgaacatcacgaacttcaacatttgcactactgcactcgatgggtgcgcgttgactcaatgccaacaactcatctataagttgcttgacctgcacagcctagtgcaggtctgacctgccccccgttttccgggccaacctgatcttagtagagtccgtctcacaagaggacggacatgaagaagcgatacaccgaagagcagatcatcggcttcctgaagcaggcggccgccggcacgccggtcaaggagctttgccgcaagcacggcttcagtgacgcgtcgttctacctgtggcggcgcaagttcggcggcatggatgtgcccgacgccaagcgcctgaaggcactggaagcggagaacgcgcggctcaaaaagctgttggccgagtcgatgttggacaacgaagcgctgaggatcgtggcgcggggaaaatactgagcccgccgacgcgacgggctgccgtcgcggacgtgcgggcgaagctgggcctgtcggagcggcgggcctgccgggcactgggcttgtcacgcagcgtgttgcactaccagccgcgcatggcgaacgcgccgttgcaggccaggctcgttgcgttggcgggcgaacgtcgccggttcggctaccgacggctgcacatcctgctggaacgggagggctggatcgccaaccacaagcgaatctaccggctgtaccgcaacgctggcctggcggtgcgcaagcgccgcaagcgcgatcgcgtggccgtcgagcgccgtccgctgcagctgccgtcggggcccaaccacacctggtcgatggacttcgtcttcgacgccctggccaacgggcgcccgatcaagtgcctgacggtggtggacgattgcaccaaggaagcggtggaaatcgccgtcggccggaggataaatggccagaacgtggccgacatcctggatgcggtatgccgtttccgcggctaccccgcggcgatcaggaccgaccagggacccgagtttaccggccgggcgctggaccagtgggcgaccgccaacggcgtgacgcttgtgctgacccagccagggaaacccacgcagaacgcctatgtggagagcttcaacggcaagttccgggacgaatgcttgaacgaaaactggtttatctcgctcgagcacgcacgggcggtaatcgccatctggcgcaaggactacaacgaggtgcgtccgcacagctcactgcccaaatgcacgcctgccgagttcgccgccgcgctgcgcaacgaaggtgccttgactggttcgaccgctgatcgaaacctgacccaccggagcggtatgctccccaacctggactctactaagtagctagtggccctgagaaagggggcaggtcaggtcatttcacacgaccaaggaagaagttatgaaagagctcaccgcgaaagaagtgaaagcagtatcaggcggaacgaatcgccttccggttaactcgggtacgattcagacccgcggcaagaatccgttctccggccctgttccgcgagacggcaccatcccctacgtgcgttacgtccagaagtaatctagtggccccgtccatcgctgggcggggccactaatgacgtccccgccccatgtcgacgtcgcgaagagtcacgcagcgttttgatgtgaggctcggattctagccgtggcgctccttgattttgacgaacctcacaacagcattggcgaaaaggtcaggatagcgatcacgccacgctcgccaccggggcgcacgctcacctgccagccgtacagatcgcacaggcggctgacgatcgacaggccgatgccaccgccctgcgaatggccggcatgcgtgccgcgatagccacgctggaacagtttggcggcatcctcttcgctcaggccagggccgctgtcagtcaccgacaccgaattgctgccgacaaagacgcgcacttcgccatcctgcgagtacttcaccgcgttgccgatcaggttgcccagcgccaccgacaacgccgcctccggcgcatcgatcaccaggttgcgctcgccttccagcgccagttccaggggcttgccacccaactgggcgcggtgggcgtccagcagctgttcggccacacgggcgacgttgctggtgccctgcccgcgttcattgcgcgacagcagcagcagtgcgccgatcaggtcgctgcactgctgttcggcacgctggatgcgctgcagacgctgcagcaccttctcatccaggccgggccgggtcagcagcagttcggtggcgccacggatcaccgccagcggcgtgcgcaactcgtggctgacgtcggcattgaactcacggtcgcgctgcaccacttcggtcagccgcgacgaataatcatccagcgcctgcgccagctgccctacttcgtcatcggggaaacgcggcgccagcggctcgggatcactggtgccgccgcgataggcacgcagtcgcgcagccaggtccgagaccggcttcatcaccttcgaggccgaccaccagcccagcaccagcgacaacaggctgaacaccagcaccgacagcaccaacgcgcggttgagctgcttgccaccgcgcacgctgtcggtcatgtcataggcgaggaagaaccaggcatcgtcggccttgcgcaccgccagcttgtaggcatacggctgcccctgctcgtcggtgccactcaaattgtaattgccgttctgcagatcggcccactgcggccaagactcgcgtgccttgtcgaacttatcagccgagtatgcgtacgctcggatctgctggacgggcaccgcaggattgcgccccgggtgctcgtagaagcggcgcgcatactcttcaatgttgtggttgatcacgtcttccaccagctggttttccacgcgcatgcgggcccagttggtggcgaacgcgaacagtgttgtcaggcagaagcccaacaacacgaacgagacgatgatgcggctgcgcaggcgccgccgatacggcgaacgccggcgctcccccttggttgccacggaatcaggcttccggggtggcgatgcggtatccgatgccatggcgggtctggatcagcggcacttcaaacggcttgtcgaccaccgcacgcaggccgtggatgtggacgcgcagcgaatccgagtcgggcagctcttcgccccagacgcgggtttccagctcctggcgggtgaccacggccggcgcggcctccatcagggcctgcaggatcttcagcgcggtcgggttgagctgtagcagcttgccctggcggcgcacttccagcgtgtccaggttgtattccagatcgccggtttccagcacgcgggtctgcacgcccttgccgcggcgcgacagcgcgttcaagcgcacttccacttcctgcagcgcgaacggcttgatcaggtagtcatcggcgccggaatcgaaaccggccagcttgttgtccagcgagtcgcgggcggtcagcatcagcaccggggtctgcttgcgcgcttcgttgcgcagcttgcggcacacttcgatgccatccatgcccggcaggttcaggtccagaacgatggcgtcgaactcgtggaccacggccaggtgcaggccggtcacgccgtcggcggcgaagtccacggtgtggccacgatcctcaaggtagtcgccaaggttggcggcgatgtcgctgttgtcttcgattacgagaatgcgcactgggacctctggttcttgaagggtcgtcggggggccaggcccacccgctcaggatgcccctgcgtgggtggacgcgacgtctacctgctgaacgatacaggttccattcttaacatttcgtaccgaagggccgacaccggcaaaagccccgcgtcagccggtcagcggctgatgcgctgctggtcggtcaacgcccggcggctgtcttcctgggccttgcgacgctgggccacggtcaggcagacgctggtcggcatgttgctgccggtaaggcgctcgcggcggcagatcatgcggctgtcggcctgggcgcgggtcatgatggtgttgacgatctcctgctcgttgaacaggtcgttgcgctcctgcggggccagctcatccaccttctcccggccattcatcttgatccggatccggttcagtgcctgctgcacgcgactcttgtcctccagcccgatctcgctgtagtcctcgctgcccatggccgtttcaacgcggcggatctgctcggacaccggggtgaaggcatccatctgcacggtgtccttctgcgccttggcctgcacggtggctaccaggccgagcgacagcatcagggcaagtgtcgtattgcggtacatgacgagctccatgttcgtccatgaatagggtctcgactttacgattccgccgatgcgcccacaagggacgcacggcagggtgaccgatggcggcatgcgatcggttcggcagcgatcagggcttgtagttgttgaagcgctggttgtcgttgagcgccttgcggctgtcttcctgcgccttgcggcgctgggccacggtcaggcagacactctgcggcatgttgctgccggtggtgcgttcacgacggcagaccatgcggctgtcggcatgggcgcgggtcatgatcgtgttgatcacttcctggtcgttgaagatctcggtgcggtcctgcggactgacctgctccacgcgttcgtggtcgcccatcttgatcttgatgcggcccagcgcctgctgcacgcggcttttgtcttccagcccgatctcgctgtagtcctcgctgttgatcgccgtctcaacgttgcggatctgttcggccaccggcgcgttggcgtcgaacttcacctgccctttctcgggcttggcgtgggcggtggtggccagggccaggcccagcatcagggcgaagggggtcatgcgctgcatcgttacctccaggttcttccatgagtggaacatcgatcctgcggtgccaccgatgcgccgtcacagcacgctcgatgggccgaagggcggtgcggtcaacgcccggcgggcggtgggctgagcgtgttgtagctgcgctggtcgttgatcagcgccttgcctttctcttcgatccggcgccgttcggccacggtcaggcagcggctcttgggcatgttgctgccggtggtgcgttcgtacctgcagatctggcgactgtcttcatggccacgcgccaacacggtgttgatgcgttcctgctcgttgaagacctcggcctgcaactgcggcggcagctcctgcacggtctggcgttcgcccatgtgctggcggatacgcgacagcgactgctgcacctggccgcgatcctcggcggacagttcggcatagtcgggggcggccagggcggtctccacctggcgcatctgctcggcgaccgagccctgccggtccatctgtacagccactttctccggcttgggggcaacagcgccagacaggcccagcagcaacgcgatcatcatgatgcggtacatcgccaacctcccgatccatcccggaacgaagggccaactctacgaccgtcacgcggcctccacaagagaccttgggcatggggccgacaggcataaaaaaggcccagacggtgcacccgcctgggcctgaagtcgtatcccgataccgatcctgctgagaggcagagctgcggttcgctgaagcctacgcccgatccgattaaagcctcgttaaaggcccggatcatttgccggtgagaatcataaccccatggataatcagggttttttgatcttctctacgtgctcgatgatgcgtgtcgccacgtcgaccccgcaggccgcttcgatgccttccagcccgggcgtggagttgacctccagcaccagcgggccgcgcgcggaacggatcaggtccacgccgcagaccgacaggcccagcgccttggccgaacgcaccgccacctgctgctcggcacggctggccttggccgccacggcggtccccccggcgtgcaggttggagcggaagtcgccctccggtgcctgccgctgcatcgacgccaccacctggtcgcccaccacgaagcagcgcaggtcggcccccttggcctcgccgatgaattcctgcatcaggaagttggcgtacaggccgcgcagcgcttcgacgatgccgcgcgaggcactggccttttcggtcaggatcacgccgcgcccctgggtgccttcattgagcttcaccacgtgcggcggcgggccgagcatggacagcagatcgacggtgtcatcggggttgtcgccgaacacggtgaccggcatgtcgatgcccttggctgccagcagctggtgcgcgcgcagcttgtcgcgcgaacgcaggatggcatcggacggattgggcgtgcgcgcgcccatcagttcgaactggcgcagcaccgcggtgccgtagcgggtgatcgaggcaccgatgcgcggaatgaccatgtccacgccggtcatcggccggcctttgtagtgcatggaaaagccatcggcggcgatgcgcatgtagcagcgcaacgggtcgaggatgcgcacggtatggccgcgcgcgcgcgccgcctcgaccagccggcgggtggaatacagggagctgttgcgggacaggatggcgagcttcatcgcggtgggatcggtcggcaggcgcgaagcatagcgcgggcgtgtggcgggtggatgatgcctggcccgtgctgcctgcaccgtcggcggtcggttcctgcggcgacgattccggcgaaagagtaaccgtcgccggatacaccacgcgcccgcatcaccgtgcgggctggttccgcttcagaaccctcgcgcggattcacccagcgccgcgatgcaggtcatctgcgtggccgagccggccgaggtgctcttgtagatctgccacagcagctgcgcggccttcggcccaccggcgcgacccagcgctcgcaatgcttccagctgccgggaggtgccggcaccggagttcttgtagatctcgtgaatactgccgacgacgtcgtccttcgtttccatgcgctgcttcccgtgtagaaaatgcggcaacgctaaccgggcgcggatggccgtggatatgaaactaatcagaaatgaagaaggccgctgatgagcggccttctgtctacgcgcggggcgtgacccgaatggcacctttcgcggccgaggtggaccaccaagagcgcacgcgacgggcatcgtcgcgagtgccggctagccacccagcttcccagtcagggagtagaggggctccagcagccattcgtagagcttgcgacgctcgcccatgatatcggcctcaagctgcatgcccgggcggagcgtctctgtcttcccgtatgccagcactctctgctgatctaacgagaccaggactcgatacagggactgcttcgaatcgccgtcgttctgggatccggtcaaagcgctgcgagagatgcggatgaccgttccttcgtgggcgccgaacttctggtaaggataggcctgatagcgcaggaggactctgtcgcctgacttgacgaacccgatcgccgaactaggcaccaacagctgtgctcgaagctcggaccccttgggaagcaggctgagaaccggctggcccggctgcaccgcctggccggcctcgacgagtcgatttgctaccagtccagctacgggtgcgcgaagcagcagctccccatctgcctccatacggacagtctcctgactcattgcagccaaatcacgttcagaggccgcctttgccgagagcctctgatagggaatttctgcgagccgctgttcaagttcggctaggttccgccgaatcgaggtcgcttggcgttgaagggcttgttgtgcgttgaccgcctcaagcatcgattgctcttgctgattaatctgaaccaagcttacgtactgctcattctcgacgctctgatatcgggcaagggtctcgcgaccaattctcacctgctcgccgcgggtatggatctctgcctcgatctgcgaaagctcgcgcagcatcgcagagcgctgggccttcgccccctcctgctgtgccactagctgtctgtcctgaaattcgctcatctcctccagcctggtcatacgagatcgctgtgcgtcaagcaacgtggacacggcgtcctgtcctgaggaggtgacccgcggcacattgatcgtcagcagcccgtcctggcgctggacgtggtccccttcttcaacatccaacctcgcaaccacgcctgctgacggagcgaccacggtggagagtccgagatcgggcacaagctcgcccaaaaccctggatctgcgtgaatattcgccaaggtaaaggaagccgacgatggccaaagcagccatcgccgcgaacaccgccagaacccagaaacggagcggttgcgccagggatacaccaccgagccagcttcgccgctgggcatcgatggcttccttgcggaagaggccgctcatgcgaggatctcctcaaggccgtcctgtgctgcattcgcggagtttgatgcgttctgcgtcagcacgcgtgctacggcgcccgcgtgcatgatcagcacccggtcggcactggcaatggtctctgggcgatgggcgatgatcacccgagtcagttcgagctgtcggacggcttcattcaccagcctttcccgctcaacatccagatggctggttgcctcatccaggaagagcagacggggcttgcgatacagggcgcgtgcgaggatcacccgctgcttctgaccaccagagagggtcgtccccatgtcgccgatcaggctgttgtagcccatgggcatcgctgcgatgtcgtcatgcaccgcggccaactctgcggcttcacgcactctggcttcatcatggtgatcgtcttcgaaggcgatgttctcgctgacacttcccgcgaagagctggtcatcctgcatcaccgcaccgaccatgcggcgatactcgcttatgctgatctttgacaggggtacgcctccgatgcggatctcaccttccgtcggcgggagaaggccgaggagtatcttgatcagcgtggtttttccgcagccagacgggccgatgatggcgactgattcaccaggatccactacaaagctgcagttcctcagcacccagggttctccgggggcatagcggaacccaaggccttcgacctcaattcggatgccgtccggcgacagagcgcttgtgctggatgtgaggctctctggttcggcaagaacaatgtcggagagccgttcgccgtgaaggcggagcatgcggaactccacccacttgtcgaccaaggcccccacccgttgtgaaaactggtccttgtaagcgaggtaggcaatcagcatgccgacggagaacacgttctccatcgccagcaatgcacccagccagatcaccgcaatgcgctccagtccaaacagcaactgattggcaccaccgaacctcagtccaaacttcgagagccaaatgtcttgattgacagtctcgttcatgaggttgaagtagcctgcttggcgaacggattctcggcccgcaacttttaccgactgaactccgcgaatcgactcaagcagatggctctcctgccgcgccccagcgatcaactgtttctctgtgcctcgcctgagcggcgcgaaggcacaggcacgaacgattgcgtacagagcaaccgcaagcaacgtgaccagcgcaagcttccagctgtagagcagcatcattccgagcgtcaccaccgccatgaggccatcaatgagcgcctcgacgaagctggtcgtcaacgtttgctggatggcatggacgcttcccatgcgcgaggtaacatcgcccagatgacgcttctcaaagaagtccaggggcaaacgcaacaggtgccggaagacgttgccagtccattgcaggttgagccggtttgacaggtatatgaccactccgcctcggatctgcccgatgcagacctgcagcagcagcgccagggcaaacccagtgcccaggactgtcagcaggtctctgtcatgggcaacgagggcttggtccacggtccattgcatgaagaacggtgctatcaggacgaacacctgaagagcaatggacagaagcagcagcaggccaagagcctgccagagcccatcgatctttcccgtcaactgcgcaagcgagacggccggtgggcaggggactacccggaactcgggagtcgggctcaactccagagcgattccagtgaagtgcagtgagacctcctccaaggaaagtctgcgcttgccaaacgtgggatccagaacggtgatgccgttgcgatgaactttgctgattacaacaaagtggttgagatcccagtgcgcgatgcacggcaactgaagttggctcaggtgccccagctccaagcgcaaggggcggcaacgaaagcctaggcttcctccaatctctatgatctgggcgagagtggcacctttgagggaaagtgcatgacgacggcgaagttcccggagtccgatgttgtttccatgatgcgacgcaaccatggccaaacaagcgagtccgcactctgctgcctcggactgaatcacaacgtcaatgagctaggccctcaaagtacgatttcgggacgggtaaaggaggcgacggaggcacaaaagaaatttgctggaaaaaccatcagacggacagaagcagaggaggcacttattggttcacaccgccccccaagaagcgagcgtcagtttatttttttgaacataccaatcccaccgcccccgccatccacaccataacaatattcacgcttcatttacgcaccactgcaaatggttggaaggctcttatgtgcttggtgctctggagcgacgcacctccagcggagtcgacagcgctctttcgacgctctgctttggaagcgacaggtggttcgattgcctcatgcggatccactccgcacgaacatcacggcgggtctacgcacgatgatgatctacgttccgtaacgcagaatcacgccttttatgatcaggcccctgctcccagcagcacgtgccactcctaatgccatctcagatccaccgcgtccccctggcgtatcgcttcgaatgcctgagagagtgccacgcccatgcaggcggccaccagccgtgccctatcgccggtaggctcatggagaggacgaacgaggaagcgcgaaccgatgacggcacgcaactcgatgggcacaagaaagcgggcgtatagcccactgggacgagaaagaagcagcggcttgggcaaaaacgatacctcgaacgatacctggacaggtcgtttgagcgttcgtttttctgccaattcacccgtgcgctatcaacaacttaggcgcagttccggtgacaaatggagcgggcgatgggaatcgaacccacgtcagtagcttgggaagctacagctctaccattgagctacgcccgcattgcgggtgaaagtctatgcggaggggccggtgcagcgcaatggtggccaccgcatccgcgaggggtcagagccctttccttgcggaaagggatccgaccccggcgggtgctgcttagaacgtgccgctgaagttggcgaacagggtggcgtcctgcgcgcgcttctggccggtcgacgcgctcaggccgaagttgctctgcaggccgaacagttcggtgcgggcgcccagcacgacggtggcgtagttcttgtcgaacttcaggcccggcacgcggtagctgcccagttccggcagggtctgcaaccaggcgctggcctgcttggtgtcctcgaactcgtgatcgtaggtcacctgcgcgtacggcttgacggcgccgccatcgaagcgggcctgccagccgaggcggccgacggtcgaatcgacgttctggcggtcatagcccagtgcggtggccagggtgccagccgcagcactttcggtgtaaccgtcgatcttcaccttctgccagatcaccgaggcgatcgggccgtggcggaagccgccttcggtgccgaactcgtaaccggcgttcagggccgcggtcaggttgctgccgtccggcgaaccaccatgctcacgggtggccgggcccagctggaccttgcggttaacgtcataggacagccaggtgtagctgacctggccgttcacccagatgcgatcgccgtaccagccggcgaacagacctgcggtggtgtccttctgggtgaagtcgccacggctgttgccgaagtcggcgctgaggcggccgaagccggcgaaaccgccgaacaccatgccgtcgcgggcccagtcgataccgaacaggccggccggggccaggccgtcgtacaggtctgcgtggtcgtagcgctgcaggtcaccgcgcacgccgccccaccaggacaggccgtcagccggacgaccacccaggtgcatgctgacctggtcggcacgcgagcggccgatggtctgtgccgagtggctcagcacctgctgcaggcgcgggccttccagcaccgaggccgcgtactggcccagcagctgatgacccgcggtggtcgggtgcacgccatcggcgaacaggtaggtgttggccgcatccgggctgacgtagctggtcgggttgcaggtcaggatgctctgcgtcgagttggccggatcgatcttgcaggcggtgctggtgacgttggtgaagccgtacatgcccgggttggcggtcacttcacgcaggatgctgaaggtgtcgagcggaatgaactcgatgcccgcctgcttcagaccaccgtacagggccttgttgtaaccggccgacagtgcagtggcggcggcggcgttggggccacggaactgcggagtgatgcccacgtccggcagattcggcacgagcacgtactgggcaccggcctgcttcagggcgcccaccagcgcgatctggtcggtgaccgcggcgccgatgatgccctgcacctgggcctgcgaggcaccaccggccgctgcgcgcgtggccgcgaacagatcattggcaccgccccatacggtgtacagggcattggcgtcggccttgccaccattcgcagcaaggtaacgggtcgcctgcgacttcagcgacggaatggctccgaggccacccgcttcgtcggccgatacacgggcgccgccgacggcgtagttgtcaccgttctggccattgccgttgggcgtgccgttgaggccgtagtagttggcgacctgctgcgcccacacccaacccgggttggtggtgaactggccggtcaccggacgcacatcggccggcagcagcgggcggaaatagccagcgtcggtcaggctgtcaccgaagaacacggccttggaatagggggattcgcctgccatggccggaagcgcggccagcgcgatcgcggccgccatcagggagcggatcgggcgtttgctgagcagcatgtaaaaaactcctgtggggatatcgttgaggacccggcggacgtacgccggcgcacggtgaatggttccactgcgccgcgttttgctcacgctgcgccgccgcatggattgtcgcctgagggcgctggaccacgctgtgccggggctggcgatcaacgaaatttgcaagggttccgatccgcgcaggccatcggcgacaatgcggcgatgaacatccagctcaacggcgaaccccgtaccctgcccgcttcggcgaccctccacgacctgctgcaggccgagcagctgctgcagcgccgggtggcggtggaggtcaacggcgagatcgtcagccgcagccgccatggcgagcacgtcctggccgaaggcgacgtggtggagatcgtgcacgcgctgggcgggggctgaggcctgcgcgggtgttcaggggtcagatccctttgccgatggcaaagggatctgaccccacgctcgaccccgccctctgcgtgaccccatcttcaggcggataagcgataatcgcgccatgaacgttcatgtctcccccgattcgctggtgatcgccggcaagacctatggctcgcggctgctgaccggcaccggcaagttcaaggacctggaagaaacccgcctggccaccgaggccgctggcgcccagatcgtcaccgtggccatccgccgcaccaacatcgggcagaacccgggcgagccgaacctgctggacgtgctgccgccggagcgcttcaccatcctgcccaacaccgccggctgctacaccgccgaggacgccgtgcgtacctgccggctggcccgtgaactgctggacggccacaacctgaccaagctggaagtgctgggcgaccagaagaccctgtacccggacgtgatgcagaccctcaaggccgccgagcagctggtcaaggatggtttcgaggtgatggtctacacctccgacgacccgatcctggccaagcgcctggaagagatcggctgcgctgcggtgatgccgctggccgcgccgatcggctccgggctgggcatccagaacaggtacaacctgctgcagatcatcgaagacgccaaggtgccgatcatcgtcgacgccggcgtcggtaccgcgtcggacgcggcgatcgcgatggagctgggctgcgacggcgtgctgatgaacaccgccattgccggtgcgcgcagcccggtgctgatggccagtgcgatgcgcaaggcggtcgaggccggccgcgaggccttcctggccgggcgcatcccgcgcaagcgctacgccagcgcctcctcgccggtggatgggctgatcggctgatgaccaatccttttgacagcgccggttccaaggccccgcccaagcccttcaccgtgagcgagggccgccgcgaggtgcgcagcttcgtgttgcgccagggccgcttcacccctgcccagcagcgcgcgttcgacgaacgctggccgcgcttcggcatcgattacaacggccagctgcgagatctggacgccaccttcggccgcccggcacacaaggtgctggaaatcggcttcggcaacggcgccgcgctgcgcttcgccgcccagcacgacccgtcgcgcgactacatcggcatcgaggtgcacgccccgggcgtgggccgtctgctgaacgcgctggccgaggacaatgccgaccacgtgcgcctgtaccaccacgatgcggtggaagtgctgcagaacgagatcgccgacggcgcgctcgatgaagtgcgcatctacttcccggatccctggcacaagaagcgccacaacaagcgccgcctgctgcagccggcgttcgccgaactgctggtgcgcaagctgcgcccgggtggccgcctgcactgcgcgaccgactgggaagactacgccgagcagatgtgggatgtgctcgatgccaccgccggcctggtcaaccgtgccggcccgcgtggcagcgtgccgcgcccggactggcgcccgcagacccacttcgagacccgcggccagaagctcggccatggcgtctgggacctgctgtacgaccgcacctgacgatcgcctgaggacgccgcgccccacatggataccgcgctgacgctgaccaacgacatgaagctcgtgctcgggctggtcggcttcacgatggcgatgttcctgttcgagcgcatccgcgccgacgtggtcgcgctggtggtgctggtggtgctcggtgtcaccggactgatcgcgccggaggaaatcttcggcggtttctccggtaacgcggtgatgagcatcatcgccaccaccatcctcggtgcgggtctggaccgcaccggggcgctgaaccggctggccgcctggctgctgcggcgcggccacggtgtcgagcagcggctgctgatgatgaccacggccatcgccggcctgaactcatccttcatgcagaacccgtcggtgatggcgttgtacctgccggtcgcctcgcgactggcagcgcgcaccgggctgacgatgcagcgcctgctgctgccgatctcggcggcgatcgtgatgggcggcgcgctgaccatggtcggcaattcgccgctgatcctgctgaacgatctgctggcctcggccaacaacaacctgccctccggcctggccaccatcgagccgctgcgcatgttcgcgccgctgccgatcggcgtggcactgctggtcgcctcgctgctgtacttccgctactacggcgaccgcaagctgatcgaggaagaaaacctggtcaacgacggggtcaccccggcgcgaaccgagagctactttgccaagacctacggcatcgaaggcgatgtgttcgagctggtggtcagcgccgaaagcccgctggtcggcatgaccctgggcgaggccgagaccctgcacgatgcgccactgctgctggccctgaagaccggcaatgacacccgcctggcgccgccggcggagatgcgcatctgggtcggcagcgtgctcggtgcgatgggcccgcgccagcagatcagcgacttcgcgcagaaccagttcctgcgcatgtcctcgcgcctgaagcacctgggcgacctgttcaaccccagccgcgccggcatttccgaggcggtggtgccgccgacctcgaacgtgatcggcaagagtgcggccgacctgcgcctgcgcaaggagcgcggcatcagcctgctggcgatcaaccgcgacaagcaggtgatccgcgaggacgtgcgtgacgtgcagctgcgcgccggtgacatgctggtgttccacagcatctggaccgacctggcgcaggctgccaagagccgcgacttcgtggtggtgaccgactacccgaccggcgagcagcgcccgcacaagttcaagatcgcgatggcgatcttcgcgttgaccatcctgatcgcgctgaccagcaagctgccggtggcgctgacgctgatgaccggcgtggccggcatgctgctgaccggcgtgctgcgcatggacgaggcctatgcctcgatcaactggaagacggtgttcatgatggccgggctgattccgctcggctgggcgatggactccagcggtgcggccgcgtgggtggccggccataccatcgacaagctgccgactggcattccggtgtgggtgctggaggtggcgctggcgctgctgaccacggcgttctcgctggtgatcagccatgtgggcgcgaccatcgtgatggtccccattgcggtgaacctggcactggcggcgggtggcaacccgaccgcgttcgcgctgatcgtggcgctgtcggcgtccaacaacctgatgacggcctccaacccggtgatctcgatgatcaccggcccggccagctacaccccgcgcgagatgtggcgggtcggcggcccgttgtcgctgatctacacctgcgtggtggtgctgatgatcaacctgatgttctgaggggcttgatcggcagggctgcgccctgcacctgcagaagccgaagcaacagcaacagcgggcattccgtgggatggcggggcactgtgggtttgcggggcgccgtaaacccatccatgggggcttggtcgcggcatccatgccgctcacaccccgcaaacccacagtgcgccgccttcgacagtttcacgcggcgggtggtgggtgccgaccgttgatcggcacggatctcgctctggtagctgtcgaccttggtcgacacggcttttgtaccgtcgagccgtgctcgactgcttctggcctcaagccaggtagacctgcccgtcgcgcacgtccaccggcaccgcgcgcaggcggtcgcccttgcacgggccggcgatgcagtcgccactgtccagcgcgaacgacgcgccatgcgcggcgcacaccaggtggccctcgcggctcttcaggaactgccccggcgcccagtccaggcggcggccggcatgcgggcagatgttcaggaatgcgcgcacctgcgcgccctcgcggtacagcaccagcgattcggcgtctccatcgaccaccgcttcgacctcggcaaacgcgccatcggcaatggcatccagggcgatcagggcagcagcggcagtcatggcgaaggctcgtacggtaaacccgcattgtcgcatgcccactcaggtgactggctgcgacatgaacacaagtcattgatccgtaataagcacaggctatatttaacgagtttttcactcaatgacagtggcgcgtcccgatactctgggttcgctgatcccagcctatcgagccgccatgttcaatcgcgcatccgccttcaaccagttccgcaccctgttcgcgccgcgcaagccgcgccacccgctggtgcgcgttgccgtgggcctgcttggcctggcgatcctggccgcgatggtgttcatcggtgtgttcgtcggtgcggcgatgatcctggtcggcctggcgtggaagctgctggcctcgcgcaagccgggtgttgcccgcccggtcgacccgaccgtggtcgaaggcgagtaccgcgtggtacgcaagccggtgttgccggcctcgcgctgatccacctcctgcgcgcccgctgacggcgggcgccatgcgttctagactgcgggcacgctcttcctggatgcccgcatgtcccatgtctccgatgtgatccctgccgtagccttgccgcgtgtgccggtagccggtggtggcagtttccccgtgcaccgcatctactgcgtcggccgcaactttgccgaccacgcccgcgaaatgggtgcggcagtgccggcggccgatgaccgcggccgcccgatgttcttcagcaagccggccgatgcgatcgtggtcggtcacgacgatgccatcccctacccgccggcgaccgccaacctgcaccacgaggtggagctggtggtggcgatcggccgcgatgcgcccgccggcgagctggccgtggccgacgccgacgcactggtctacggctatgccgtcggcctggacctgacccgccgcgacctgcaggccgcggccaaggacaagggccacccgtgggacgcggccaagggcttcgacgcctccgcgccgatcagcgaaatcgtccacgccgaggaagtcggcgacctggccgcgctgaacctgtcgctggaggtcaacggcgaggtgcgtcagcaggctctgctcgaccagatgatctggaacgtgccggagatcctgcatgagctgtccaagctgtggcagctgcgtgccggcgacctggtgttcatgggcacgccgtccggcgtggccgcgctcaagcccggcgaccgcttcagcgcgcgcctggaaaacgtggccgagcgccacggcgtgatcgccggctgacatcacctgcgctaccctgcgcgctgtccacttccccaccggagaaaaacaacaatgggaatgctcaccgagttcaaggaattcgcgatgcgcggcaacgtcatcgacctcgccgtcggcgtggtgatcggcgcggccttcggcaagatcgtgaccgcactggtcgagaagatcatcatgccgccgctgggctacctgatcggccgcgtggacttctccagcctggcctggacgctgtcgccagcccggctcggaccggatggcaaggagatcccggcggtggtggttggctacggcgacttcatcaacaccgtcatccagttcgtgatcgtggctttcgcgatcttcatcgtggtcaaggcgatcaaccgcctgtcgcgcaagaaggaagcggcaccggcggcgccggccgaagaagtggtgctgctgcgcgagatccgcgacagcctgaagaagtaagggtaccgggcgcctatgggcgcccctcccacctgtagagccgagcccacgctcggctgatctgcaaaaggcagccgagcatgggctcggctctacagaagcaggcgaaagccccgctccggcggggctttcgctttgctgcatctggcggaaaacagcatccgcgccagccatgacctcccgcccatgcgccgggctgaacgactgttaagctccaaggcttaggtcccttcccggagttgtccatgcgtcgccgcgtccttgccatcgcatcctccctcgccctgttggccgccccggccttcgcggcaccgcgcaccaccaccctgccccccgcctcgctggcgaccgccgcgcagctgcgcgaccaggcgctggccgatgacaccggctggaaggtggtcgagtcgctcaccaccgagattggtccgcgcatcgccggcagcgaagccgatgcccgcgccgttgcctgggccgaagccaagttcaaggccctgggcttcgacaaggtctggaaggagccggtgacgttcccgaaatgggagcgtcgcagcgaacacgccgccgtgaccggcaggaacccgcagccgctgcagatcaccgcactgggcggcagcccgggtggcaccgtggaagccgaggtggtgcgcttcgccgacctggccgcgctgcaggccgcaccggcaggttcgctgaagggcaagatcgccttcgtcgattaccagatgctgcccttccgcgatggccgcgattacggccgcggcggtgcgatccgcagcaagggcccgtccgaagccatccgcaagggcgcggtcggcttcctgatgcgctcggccggtaccgactcgcaccgcgtgccgcacaccggcatcacccgtttcgatgacggcctgaccccggtgccgtcggccgcgctgtcggtgcccgatgccgaccagctggcccgcctgctggcgcgtggcagcaccaaagtgaaggtggcactggattgcggctgggacggcaccgccacctcgtacaacgtgatcggcgagatcaccggccgcagcctgccgaaggaagtggtggtgatcggtggtcacctggattcgtgggacctgggcaccggcgccgtggatgacggcgcgggcgtgggcatcacgatggccgccggccacctgatcggccagctcaagcaggcaccgaagcgcaccatccgcgtgatcgccttcgccaacgaggaacagggcctctacggcggcaaggcctatgccgaagcgcacgcgaaggacgtggccctgcaccagctggccgccgagagtgacttcggcgcaggccgcatctacgccttcaatactggttcaccgaatccggaaggctcgcgtgaagcgacgaagcagattgccgaagtaatgaagccgctgggcatcgagtaccaggccgacaagggtggcccgggcccggacgtcggcccgctggccgccaagggcggtgcgtgggcgtggctggcgcaggacggctcggactacttccacctgcaccacaccgccgacgacacgctggacaagatcgacccgaaggcactggcgcagaacgtggccgcgtataccgtgttcgcgtacctggcggcggaagccgacggcagctttggcagcgaggccaaggcgaccacgccgccgaacgagtgatgcggtgacacagggggtcagagccctcgcccttggcgagggatctgacccctgatcgtattagctctcccagacccgggtgttgcttaccccgatcgtctgcggcttgaacagcggatcacgctgcttgcgcttctgcgcctcgtaatcgcgcagtgcggccagggcaggcctttgcaacagcaggatggcgatgatgttcagccagctcatcaggccgacgccgatgtcgcccagcgaccaggccaccgttgcactgttcaccgccgagtagccggttgccgccaggaacagcagctggaagccgcccatcacccagggcgtcggccgatcacggcacagatagctgacgttggtctcggccatgtaatacagcgccaggatggtggtgaacgcaaacggcaggatcgccagcgccacgaacgaacggccgaagcccggcagcgtcgattccaccgcgtgctgcacgaagcgtgggccggcttcgacacccggcagattgcccagcagcaggcgcgcctcatccggaataccgttcaccgccggatcgtagacgttgtacaggccggtggacaggatcaggaaggcggtcgcactgcacaccaccattgtgtcgatgtagaccgagaacgactgcaccaggccctgcttgaccggatgcgagacttccgcggcggcggccggatgcgcaccactgcccatgccggcctcgttggacagcacgccacggcgcacgccccactggatggcggtgccgatcatcgcgccgaacgccgcatccacgccgaatgcactgcgcagcaccagcatgatcacctccggcaccctgtccgcgttgagcaccatcaccagcgccgcgaccagcaggtaggccatggccatcagcggcaccacccattcggccacgcgcgcaatgcgccgcacaccgccgatgaggatggcacccagcaccaccagcagaaccgccgtggtggtcatcaccggcacgtcccaggcttcgttcaccgcactggtgatcgcattggactgcgtgccggccagcatcgcgcccgccagcaccgtcaccaatgcgaacagcactgcataccaacgttggccgaggcctttttcgatgtagtacgccgggccgccccggtactgccccttgccgtcgcgctccttgtagatctgtgcgagcgtggattcgatgaaggcactggatgcgccgaggaaggcgacgatccacatccagaagatcgcgccgggcccgccgaaggcgatggccatggcgacgccggcgatgttgcccacgcccacgcggctggacagcgaaatggacaacgcctggaacggcgacacgccggcatcggagcgctcatggcggaacatcaggcgcagcatgtccggcaatgcacgcagctggatgaagcgcgtgcggacgctgaagtacaggccggtgagcaggcacagcaccaccaggtaggggctccagacgacgccaaggatcgcgttgacgatggattcgatgttcatcggcggtccctcagaagaacatgcccagggcgacctgggggctgatgatgcggccggtgttgcggccagccacgctgaactcgacgccggcgatcaggcccagtgacgggctgaagtggtactccacggccggcgccagggtgacgctgcggctggccgggcgatgctcgtcgatgcgttcgaaaccaccgatggcgttgcgcgcgaaacccctcaggcgctggccggtctcgcggctggcggccacttccatcacgcccacccagcgcggattgaagctgtactcggcgccgaccgacagacccagcaccgacccccgggagatgtgcccctggaagctgtcgtcggtgccgtagacgctggccccggagatcgccgtccgcgacggcgcaggcccggcgctgagctgggcacgccagcgcagcgggcggtcgttacccagccagaccacctgctgcacgcccaatgcggcagtggtgcgctgcacaccgtcgccctgcgcatcgagcggattgccggtgatgcggtcatggctgccggtgctgaagcgctgcaccagcgcaaccgagacggccggacgcgtgccatcggcattgggcgcctgcaacaggtactgcaggcgcgcggtggtgtcaccggcacggaaaccactgctgcgcgcgccgccctgttcggcacgcgatgcactgagattgacctgccccatcacccggtcgctgaagccgtagatgatcggtaccaccgttgcccatgcgccgctgcgttgcccactgcggcggcgatggccgccatcgtcgtaatgatcgcggctgtcgatccgcaccagatagggttcgatgtaccagttgccctgcggcaggccagccgggttgggggtgatcagcggcccggtgaagttgacgccgtccaggctgcgttcttcggctgcggcacggccgttggcaaggacgctggccaggaccagcaatgcgatgaggatacagcgtgggtgattcatggcagcctcttctggacaacgtgggatggagttccaccctgcgttgccggaagcgactgaccaataaggaaactttcaaaacgtcatgcgcgcttgacgcaattgcggaccctggaaggggtcagagccctcgcctgcggcgaaggatccgacccgggataccggatcagccgcggcggctcgcccactgcgccagcagtaccgccgtggccgaggccacgttcaggctctccaccgcgccgctgccgggaatcgagacctgctggtcgcacgctcccgccaggctgcggtccatgccctcgccttcggcgcccatcacatacaccaggcgggccggcagcgaggtgcggaacacgtcgtcaccgccctccaccagggtcgccgccaggccgaagccggccgcacgcagctgcgtcatcgcctgggcggtctccggcagctgcaccagcggcagcgcttctgcaccgccctcggccacgcgcgcggcggcaccggacagcgccagcgtgctgccggccggcagcagcagcgccttggcgccgaagtgtgcggccgagcgcaggatcgcaccgaggttgtgcgggttgcccacgccatcaagccacagcgccagcgccgggccgtcgccgacctgctccagccactgcgccagcggcagcgccggtgcgcgcagcacatcggccaccacgccttcgtggtgggtggtgccggcaagcttgttcagatcgccgtcttcaaccacgcgataccccacgcggttggccacgcaccacttcagcagcggctgcaggcgcggaatgcgcgcctccagcaggtacagcttgcgcagcgcctgtggccgcgcttcgaacgcggccagcacggcattcaggccgtacaggcgcagctcgtcgctgccaccgcgcccaccaccgcccgtggccggcacctccgggcgcggcaacggcgttgcgcgcggcggacgggcggacgggcggcggttgttccaggggttgttcacttacacactctcctgcttgcgctggcgccagaaatcggcgttcttgatgcccagggcatcagggtcgaacaccggatccaggcccagcttcttctgtcgttcgtagtcacgcagggccagcatcgccggcttctggatgatgaggatggcaatgatgttcagccaggccatcaggccgacgccgatgtcacccagcgcccaggccagggtcgcattatggaacgcgccgaacaccaccatgccgatgatgcccaggcgcagcaccagcacggtcagcgggcgcttcctgttgtggttcacatagctgaggttggtctcggccatgtagtagtacgccatgatggtggtgaaggcgaagaagaagatggcgatcgacacgaacgccgaaccccagcccggcagcaccgcttccacgccggcctgggcgtagcccgcaccttcgggaatgccggccaggccctggaagatcggcgcggcgccctccaccggcgagtacacgttgtaggtaccactggccaggatcaggaacgcggtggcggtgcacaccatcatggtgtcgaagtagatcgcgaaggcctgcacgtagccctgcttggccgggtgcgagacttccgaggcggccgctgcatgcgggcccgagccctggccggcttcgttggcatagatgccgcgcttgatgccccactccaccgccaggcccatcatcgcgccgaatgcggcatgcgtaccgaaggcactcttgaagatgatgccgaacatttccggcacgcggtcgtagttgatgatcatgatgatgatggccatcaggatgaaaccggcggccatgaacggcaccaccacttcggcgaagttggcgatgcgcttgacgccaccgaagatcaccacgcccagcagcagcgccaccacgatgccgatgcccagcttcagcgcctgcaccgattccatgccgaaggcctggccatcgagcggaccgcacagcgcggtgccacggcaggcgttgatgatgctgtcggcaatggcgttggcctgtacgcccggcatcaggaagccggcggcgatgatcgtggcgatggcgaaggccagcgcgtaccacttcaggcccatggccttttcgatgtagtacgccgggccaccgcggtagcggccttcggcgtccttggtcttgtagatctgcgccagggtgcattccacatacgacgtggacgcgccgaggaagcccatcacccacatccagaagatcgcaccggggccgccgaaggcgatggccgtagccacgccggcgatgttgccgatgcccatgcggccggccatcgacatggccagggcctggaacgaggacacgccggcgtcggatttctcacccttgacggtgaggcggcacatctcgaagaagccgcggatctgcatgaagcgcgtgcgcaggctgaagaacaggccggcgcccaggcacacgaagatcagtgccttgctccagatgatgctgttgatgaagtgtacggttgcttccacgcgcgctctctccagtcggcgggttgtaaggacgtcccgtcggctggaagggaccggtcgattctccctgatcgcaggccgctgcggtagcgctgttttgtagagccgagcccatgctcggcttggccccccgagggcagccgagcatgggctcggctctacagcggccagcccgcgtgttcacggcagctgggtgcgtacccgggcgaaacggcgaaggtcgtgcagcacgccgcgcttgtagaccgcgcagcgctccacgccctcctcctggaagccgttcttctccagcacccgcgccgagccgaggttgaagtcgacgaccgtggcctgcagcctgaacaggcgcagctcgtccatcacccacggtgcgaacagcccgaccacacgggtcatcacgccctgcccccaataggcctggcccagccagtagcccagttcggcggtgtgcccacgctcggccatgccctgctgggcagcgacgctgccgcaggcctggccgtcgatctcgatggccagattcagggttccgggggccagcacgcggccggcgaggaaggcctcgccatcggtgcgcgtgtacgggtacgggaaacggtcgcgcaggccgcgcgacacctcggaatcgttggcgtggcgcagcagcgattccaggtcttcattgcgccagggacgcagtcggaaaccttcaccctggagtggcggggtcagagccctttccgttccggaaagggatccgacccctggtccgaccccgtcggcgggccgatcaggcatgaccgcccaccgagggcgattccgcttcctgcttctccagctcgcgcttcaccgcttccggcgaacgggtgtacggggcaagccgcgcgtagaacgccggcaccacgaacagcgacaggaaggtcgagagggtcacgccgaagatgatcacgatgccgatcgtgccacggctggccgaaccgggaccaccggccaccaccagcggaatggcgccgaccacggtggcgatcgaggtcatcaggatcgggcgcaggcgcaccatcgccgattcaatgatcgcctcgcgcacgctgcgcccatcgtcgcgcagctggttggcgaattcgacgatgaggatgccgttcttcgcggccaggccaaccagcatcacgatgccgatctggctgaacaggttcaccgtaccgccactcacccacaacccgaccagcgcgccgagcacgcccagcggcacggtcagcatgatggtgagcgggtggatgaagctctcgaactgcgcggccagcaccaggtagaccaccagcagggccatggcgaaagtgagcagcacggcgccaccggcgctctggtactcgcgcgattcacccttccagttcacctgcgcgtactgcggcagctcttcctgggccacgttctgcgcccaggcaatggcctcgcccagcggatagcccggcgccaggccggcactgatggtgatcgagcgcaggcggttgaagcggttcagggtgccggcctcggccacttcgctcaacgtgaccaggttggacagcggcaccagttcgccagaggtggcgcgcacgcggatcgcggccaggtcggccgggctggcgcgaccgtcacgtccggcctgcaccagcacgtcgtactcctcgccgttgtcgacgaaggtggtgacgcggcgcgagcccatcatggtttccagcgccgaaccgatcgcggtgaccggcacgccgagatcggccgcacgctggcggtcgatgttgacccgcatctgcggccgggtttccttgtagtccgagtcggggccgaccaggccggggttgtcggccatgcgcagcaggatgcggtcgcgccactgcgcgatctccgcgtattccggcccacccagcacgatctggaacggctgcccgccgctgcgcaccaggccgccaccgacctgggtacgcacacgcacgccgcggatggtgtccagttccttctgcagttcgttggccacgtccggcgtggcctcgctgcgctggcgccacggctgcaggaagatgctgacgcggccggtgtgcatttcctcgctggcaccgaagccaccgggcacgcgcgggttggcacgcacgatcggcttgtccgggccgacatgcggggccagcagcgcctccacctgctgcacctgctgcacggtgtagtcgtagccggcaccttccgggccgtcgatcatgatctggaacgaaccgcggtcttcggccggcgccagttccgagggcagcagcttgagcaggccccagctggcgaccagcgcggccaccatcaccagcaggtagatccaggtgcggtcgacatggtgatcgagcacccgcccataggcacccgcgagccgttccaggttgcggttgatgaagccgtgcaggccacgtggcgcctgcccggtgtgcggcttgagcagcttggaggccatcatcggcgtcagtgtgagcgccacgaacgcggacaacgccacggcggcggccagcgccactgccagctcgcggaacaggcgcccggtgttgccttccaggaagccgaccggcaggaacactgccaccagcacggcggtggtggcgatcaccgcgaaggcgacctgcgcggtgccgcgcttggaggccaccagcggtggctcacccaggtcgatgcggcgctgcacgttctccaccaccacgatcgcatcgtccaccaccaggccgatgcacagcaccagcgccagcagggtcagcaggttgatcgagaaatcgaacgcgtacagcgcgatgaacgccgcgaccaggcagaccggcaccgtcaccgccgggatcaacgcggcgcggaaactgccgaggaacagccagatcaccgccagcaccaggatcatcgcttccaccagcgtggcgtagacgcggtccaccgccgcttcgatgaaggtggtgttgtcgaaggcgacgaagatctgcgtgcccttgggcagggtcagcgccacccgctcggcttcagcgcgcgcggtacgcgccacgtccagcgagttggccgtggaggtcttgacgatgcccaggccgatgcccggttcgccgttgctgcggtagtacgcgcggcgttcggccgaggccagctcgatcttcgccacgtcgcccatgcgcaccacgtaaccgtcgcggcccttgcccagcgggatggtcgcgaagtcttcgggcttgatgtagttgcgctccacgcgcagggtgaaatcacggtcggtcgactcgatgcggccggccggcagctccacgttctcgttgcgcagcgcggtttccacgtcgccggtggtcagcccgcgtgcggccagctggtcccggtccagccagatccgcatcgcatagcgctggcggccgccgatgcggacctgggccacgccatcgaggctggaaaagcgatcgaccacgtaacggtcggcgtagtcgctcagctccagcgtgtccatggtcgaggagaccatgttgaaccagatgatggggtcggcatcgctttcgaccttggcgatctccggtggccgcgcctcttccggcatgcggtcggccacgcggctgaccgcatcgcgcacgtcgttggccgccgcttcgatatcgcggttggaggtgaactcgatgctgacctgcgagcggccgttggtgctgcgcgcgttgatcgtatcgatgccttcgatgccggccagcgcatcttccagcacctgggtgatgcggctttcaatgaccgccgccgaggcgccggtgtagtccaccgagaccgagacgatcggcgggtcgatggccggcagttcgcgcagggtcaggcgggtgaaggacatcacgcccagcaccagcagcaacaggctcatcaccacggcgaacaccggccgctggatggagatgtcggacagcttcatccgccgtggccctcggccgcggccggcgcagcgtcttcagcgggctttgcaccactggcgggcgctgcgtccttggcggcaaccttcaggcccggacgcagcttgccggtgccatcgaccacgatgcgctggcccgcttccagaccctgcctgatctcgaccacgccggcacggcgcgcgccagttaccacgtccacacgctcgacgctgtcgtcagccttgatgcggtacacgaaggtatcgcgaccgacctgcaccacggcgatttccggaatcaccagcgccgggcgctcggggcggaacaggcgcacgtccagcagcatgccaggacgcagcgcatggtcgccgttggcaaagtcggcgcgcacggtcacggcacgggtggccgggtcgatgcgcgcatcaatggtgctgaccacgccctcgaaggtgcggcccggccaggccacgctggtggcgctgaccttgtcaccgacgctcagcgcagccagttccacttcaggcacctggaaatcgatgtgcatgtgctcgatgtcatcgagcgtggcgatgaccgtggtcggggtcaccagcgagccagggctgacctggcggatgccgagcacgccggcgaacggcgcgcgcacgcggcgatcaccgatgtctgcctgcatctgcatcacgcgcgcttcggcggcatcgcggatcgacttctgcgtatccagtgtggcgctggacaccagccgctgggcggccagctcgcgctggcgcttgtacagctgatcggcttcatggaaggtcgcctgcgcctgcaccagtgcggcctcctgggcctgcccacgcagggtcacgatcggcgcaccggcagcaatgtgctggccgctttcgaaatgcactttctcgacgatctcgctgaccttggcggtcacgctgatcgattcgcgcgccttggccgtgccaagcgcctgcagggtgtcgctccactgacgggactgcacgacctgcgcagtgaccggcaccgcttctccctgccgacgcgcggcggcctcctgtttgcctgcgcacccggccagcacggccaggctgaggccaagggccagggtcgaagcgatacgagccaacatgaacggtccaaattgatccacggccgccgagtgtaggcaagtgcccctgaaagcggtatgtgccaagcgtttaccggcgtggaaccagggctgcgatagcgccttgaacccattccgtgcaaggctgccatgggcagtgtcggcgtgtatcggggtgtatcccgtcgtgcaccgccgggtcagtcatcgtagagtcgaagctgcccgacggagggcgtcgggcggggacggatcctggcggggatccggccccgttttttttacatccggcggatcaataccggtagttcagcttcatccacacgctgcgccccggctcgttgatgcgcaccgggtcgcccgggaagccgaagtcggcgctgccggccaggttcaggtgctcgctgtaggcgcggtcgaacaggttgtcgacgcctgcgctgagctgcagctgcgaaccgaaacggtacgccgcgttgagcgcgaaggtggcaaagcccgcgctcggcccgagatcctgtgcgaccacgttgccctggccatctgcgacacggtgctggtgggtcaccgcgcgcagcagcgcaccggcgctccagcgctggccttcccagttcgcactcaggcgcgcttccagcggcggcatctgcggcagcggacgctgctggtcgcggttctcgccccaggcataggccagcgtgccacccagcttccactgttcggccacgctcacttccagccccgcctcggcaccggcgatgcgcgcatcgacgttgctggcctggctcatccccatcgcgccgctgcggtggtaggtgaacaggatgtagtcctggatctgcccggtgtacgccgagacccaggcctgcacgcgcggtcccttgtactgcaggccagcgtcgagctgggtggtgcgctcgggctggatgccggcaaacgcgttcaccgcatcggccgggccgtggtcgggcgagaacagctcccagtagtcgggcatgcgttcactgtggccgaggccggcgtaccaggtcaggccgtcggccaggtcctgctcgtagcgcaggaagccactgccgagccattccttgcgacgctggcccgcagtcggattgggcatgttgcccatcattccgcggagcgactgccgctcgtcgcgcacgctggcgcgatcgatgcgcaggccgctgatccaacgctgatcggtgccggcgccgagggtcaactcggtgaacacgccatagcggcggaagtgggcatcggtctcccacgccacctggcgataggtgccgcggcccatgcccatgcgcccacgatggcggctgtcttcgccgtccacgcccgccaccagctgcacgtcctgccagcgccactcggaactgacccggccgcccagggtacggcgatccacgttcgaggccatcggcatcggcatcatgctattcgggttcggcgcacgcagcgtatagttgtccatcacgtgatcggcctcgttgtagtacacgttggcctgcaccgtgtcccacgcacccggcaggttgcgcttctcgaagcgcgcggcatagctggtgcgttcgaacgcggccccgtccatgccgcgtcccgcatagcgtgcgatcgcatctccggcaccggcagaaatttccagcagcgtgtcggcatccggcgtccagccgatcgctacgtcaccgttccacttgcgccacttcgatggcaccacatcgccgtggccgtccttgtagtcatcggcttcggaacggttgccactggcgcgcacatagccggtcgggttgcccagggtcaggtcgagcacctggtcgttgcggttgcgcgaaccgaccagcgcactggcatcggcacgcaggcccggctcttcgaagcgcggtgtatcgcgctcgaagcgtacggtgccagccgaggcacctgcgccccagcgcacgctctgcgggcccttgatgatggtcagccggtcgaagctttccggcgcgatgtaggacagcggattgtccatgcgcgacgggcaggcaccgatcaggttgccgtcattgctgaggatgttcaggcgcgaaccgaacatgccgcgcagcaccgggtcaccgttggtgccgccgttgcggatggcggagaaaccgggaacggtcttcaggtaatcggcgccatcactggcgggtaccggctgccgcggcaggcgtgggtcggtcacccagtgcagtggcgaggacggtgcggcagcggtgaccaccagggtgtcgagggtacgcgcctcttcggcgggcgcggcatgggcgagcgttgcagctgcggccaggccaagggcaaccggcaggcgcgcacaggcgcccgcggggcgggaagtcattttcatcggaacagctccaaggtacgcacgcgcgcacggcgcccggtcaggcgtcgtgcggcagattcgacagggacatcagcgaacgatggagaaaggcggcggcccacgcgcggcatgcgccggccagcacagcgcgggcagcacctgccgcgaccaggggaacaccagccgcggccgccacaacagcggcaacagcagcacaagcacggccagccacggcagcaggcgcatcgccagcacgcagtattcgcaggcttcgccgtgcatggcgtggggatcggccggtggggtcggatccgtgtgcgcgggcaaggggctctggcccgctacggcaccatcatgctgcatgtgcgcgtggtccatgccggccatcgcagcgtggtccatcggctgcgcatgcagcgcgcggctgaccagcggcgcaagcaccatcagcagcgtcgccaggacggcaagctggagcagaaggcgctgcgggcgggacagccgggtcatcccgctagtgtagagccgggtccagggttgcccgtgcgacgaaccgtcgcaggaggggtttatcggcagggctgcgccctgcacctgcagaggccacgtccacggcaagagccgaagcaacagcaaaagcgggttcctgtgggtaggcggggtgggtccggttgcgggagacgccgtaaacccatccatgggggcttggccgcggcatccatgccgcggacactcccgcaaccggacccaccccgccttcgacagtttcctgcggtctgttggaacggctttggggtcagatccgttttccgaaggaaaacggatctgaccccagatgtatttcgatatctgacagctttcatccacgcatggcgtggatctaccgtgtcgaccaaggtcgacacctaccaacagccgcgaagatctgtcagaggtggggcggtgtcggagtgcggggtgtcagccgcatggatgcggctgccaagcttacagggacgtacttgcagcgtccccgcactccgacaccgccccgccaacccacggaatgccgcttctgctgttgctgttgctgttgcttgaatgccgcggcaggtgcagggctgcaagccctgctcgaccaacccctcacaccgtgatggtctgggtcagtgattcccaggtcggtggcaccggccacgcggccgcctggttgccatccagcacccgccgcaggtcgcggggatcgatctgcggtgccagcacatgcaccagctccagcgcgtaatcacgcagcacgcggtcacgcggcagcaccgcccaggcgatgcactcgctgatcgggtccggcgccggccacgacctcaggtcttcatcgttggaactgaccgccatttcggccagcaggcccacgcccaggccggtacgcacataggtcttgatcagatcggcatccagcgcggtcagcgccagatccggcaccagcccgttggcggcaaacgcacgctgcagcgacgaattcgggcgggtcgaggattcgtagctgatcaatggttgccgggccagcgcggccaggtccggtgcacgcccggcgcggtccagcgggtggcccttgggcaccaccaccaggcgtcgccagcggaacagtggcaccgcgatgccatcggtgggctcccccccagcggtgctgatgatggcgatatccgcgtcaccctggttcaagcgatccagcgcgtcggcttcaccggcctgctgcaggtgcacgctgacctgcgggtaagcctgcttgatcgccgccaccgccggcggcagcacgaagcgcgcctgggtgtgggtggtggtcaggatcagctggccctggctctcgcgccgctggttggccgcgtaggtgcggatgttgttggcctcggccagcacggcgcgggcgcgggcgatcacctcggtcccggccggggtgaccgactccaggctgcggcccttgcgcacgaacaacaggaaacccagctcgtcctccagctgcttgagctgcttggacaagccgggctgggtggcgtgcacgcgcgaggcggccagcgtgatgttcagctcggcgtcggcgatggcaaccaggtagcgcagctgggtcagcgtcatgggcaggcaggcggcgtggggcggaggtccactctagggtcaattgccgtcaccagcttataaccaaaggttgtttaagaaaggtatctggtcatttccgggcgtcatatgccggcgctacggtcagccggcagccgctggcctgaacagccagccctcccccttcgcccgccgaagcccggcgcggccccgtttccggagcgcttccatggccctgtacgactccatcctcgacaccgtcggcaacacccccatcgtcaagctgcagcgtctggcaccgccgcaggtcagcgtttacgccaaggtcgagtcgttcaatccgggcggctcggtcaaggaccgcctggctttggcgatcatcctcgacgctgaagcgcgtggcctgctcaagccgggcgacaccatcgtggaggccacctcgggcaataccggcgtggcactggcgatggtcgccgcagcgcgcggctacaagttcgtggcgaccatggtcgagaccttctcggtcgagcgccgcaagctgatgcgtgcctatggtgccaaggtgatcctgaccccggccgccgaacgcggcagcggcatggtgcgcaaggcagccgaactggccgaacagcacggttggttcctggccagccagttcgccaacccggccaacccggcctatcaccgcaacaccaccgccgcggaaatcctgcgcgacttcgccggcaagcggctggactatttcgtcagcggctggggcaccggcggcacactcactggtgtgggcgaagtgctgaaggtcgcgcgcccgcagacccgcatcatcgccaccgagccggccggcgccgccctgctcaagggcgatgactggaagccgcacaagatccagggttggaccccggacttcgtgccggacgtgctcaaccgcgatgtggtggacgaactggtctcggtcgaagatgaccgcgcgatcgccaccgcgcgccgcctggccgccgaggaaggcatcttcgtcggcatctctgccggtgccaccgtggccagcgcgctggacgtggctgcccgcgccgaacccggcgcggtgatcctggcgatgctgccggacactggtgaacgctatttctccacaccgctgttcgccgatgtcaacgaaggctccgacgacgactggctggccggcctgccgtaaaccgcccggggtcggatccctttgccgcagggaaagggctctgaccccacccgcgtggatcagcgacaggggtcagagcctttcccatgcgggaaaggatctgaccccgttctgcttcagcctgcgtgaaggcgtcgcccgccatcgtgcgtgaaggccgtcggatcgcagcgcgtgagacggtcatgacgcagtatcgatgccctgtcccctaccgtgggaacagccggcgcagatgctgcgcggatcacctcacaggcaggagacggacgcatgaagatcgaggtttggcagggtgacatcacgaccctggcggtggatgcgatcgtcaacgcggccaacgaaacactgctcggtggcggcggtgtcgacggcgcgatccatcgcgcggccggccccgcattgctggccgagtgcgcgcagttgccggagctgcgcccgggcgtgcgttgcccgacgggcgaagtgcgcgccaccagcgcccatgcgctgccggcgcgccatgtactgcacacggtgggcccggtctggcatgacggccagcgcgacgaaccggcgctgcttgccaactgctactggaagtcgctgcagctggccgagtcgctgggcgtgcagtcgatcgcgttcccggcgatcagctgcggcgtctatggctatccgctgtaccaggcggcgcagatcgcagtgaccgaaacactggcgtggcagcgcagccatgcgcaaccgatgcgcatcgtgctggtggcgttcaataccgctacggccaaggcctaccagcaggcgttgagcgccgccgggcaaagcgcggacagcgaaccgcgcgggtcgatgctgccgcccctgggcgatgcgggttttgccgccgcgcactgaatcccggtgcgcgacgtaaagaaaaaggccgggcagtgcccggccttttccgttgcaccgttgtgctcagccacgcatggcgtgggtcacgctcaacggctggcagcttccaccgcggcggcgtcatcggccacggcggctgcgtcggctgcggcgcgtgccgccgaggccgcagccccatcggcgctggcgccatccacctgcacgcgcacttccaccatgcccgcgccattgttcaggctggacacgtcgaccgtgtaatgaccggccggcagggtctcttccaggcgcgaattggtgccgttgccaccatcgtcgtcggtcagctcgacgtcgccaccgaccacgcgcagcacggtatcaacctggctggaaatcgcatccaggcgcacatcggccgggcggtccagcgacagcaggaagcggcgacggccatcgttgtcgagcatcgtgtacacgctgcccgacttcggcagtgccgtgccatcgcgctcgaccagattgccgggcagctcgatgcggttggccgacagggtgaacatgccgctgacgccgtcgccgaggccgcgcgcggtcagggtgtacttgcccggcttcagtgacagggtcaggcgcgagttggtgctgtcgccgccatcgtcattctctgcatccacgccctggcccgacagcttcagcaccggatcgaagacatccgacaccaggcggatctcgtacaggccggccttgtccacctgcagggtgtagtcctgggaaccaccggccagcatgtcgacgatctcgccgctgcccgccagcggcttgccgtcgtacggcaccagcttctcggcgcgcaggcggtaaggaccgtagtcggtcgagccgttggcgttgaccgccacctggtaggtgccgccaccgttggcacggaaggccaccgagacgtcgccttcgcgctcgtagccggtgttgctgctggccaccaggctgccgttgttgaacacggcgatcgagccgctcagcgaaccggtcagcttcagcccgaccagctgcttgtcttccagcttgatctggtagagctggtggtggctgccgtcgttgtagttgatgccgctgcgcgaggtgatctcgccggataccggcttgtcgaaatcgagtgacgcggccttgcccgcgtccgcgccgccgccgatgcggttgcaaccgctggcgaccaggaccgtggcaacggccagtgtgattgctgccaaacgcatgttgtttctccttggccttccatgtggttcccgcataccggccaggcacgcgggggcggaaaagatacccgcaaaagcaaacgccggcgtgatgccggcgctgccttgttcatccggcgatgggacggatcaaccgttccacttgcccagcgcggccaggccgttgtccttggcgcgctcgtacaccgtcttctgggcagcagcgtagttgcccttcatgtccttggcccacagcttcagcgcggcctgctgcatggcgcggccgtaggagaagctcagcggccacggcaggttgcccagctggttcatcgcgttcaggtgctcggtggactgctcgtcgctctggccaccggacaggaacaccacgcccggcaggatcgccggcacggtgctcttcaagcacatcacggtcgactcggccacttcctcgacatcagcctgctcttcacagtccttgccggagatgaccatcgaggccttcaggatggtgccttccagcagcacgttctgctggtacagcgcgtcgaacagcgagcgcagggtggcttcggtgacttcgtagcaggtttcgatgtcgtggtcgccgtccatgatcacttccggctcgaccatcggcaccaggccgcattcctggcacagcgctgcatagcgggccagcgcatgggcattggactcgatgcaggtgcccgacgggatgctctcgccgatgttgatgaccgcacgccacttggcgaagcgcgcgcccagcttgtaatactcctgcaggcgctcgcgcaggccgtcgaggccttcggtcaccagctcgcccgggcagccggccagcgggtgcgcacccttgtccaccttgatgcccggaatcatgccgtggtcggccatgtacttggcgaacggcacgccgtccttggtcgactggcggatggtctcgtcgtacaggatggcgccggaaatgtgctcgttgagcttcggcgtggtcagcagcagctcgcggtaggcgcgacggttctcctcggtgttctcgataccgacgccggcgaaacgcttggcgatggtagcggtggattcgtcgatcgcgatgatgcccttgcccggggcgaccatggcctgggcggtttcagccagctgttcgatgctcatgtatttcctgtggcgggtgcgggaaaaacgtaagtatagccctgctgcccgttgcctcgccgtggaggacaggatggaaacgcttccacgtctacgcaggacaaaggatgtcctgcggcatggggtcagagccccttcagggatctgacccctggtcagtaaggggtcagatccccacataggctctgaccccagatcggcagcgccgacccgaccgtcaaggcttacagatcgcccaggccgatggcgcggccatcctcgcccacttccagcaggcgcagggtgttggtggcaccgtgggtttccatgtgctcgccgctggtaaacacaacgcggtcaccggcctgcagcagttccgattcgaccagcaggcggatgctgccgcgcgccgcttcgcgcggggtcaggccgcggctgtcgaagttgatcgggaacacatcgcgcatcagcgccatctggcgacgcgcaccgtcatggcgggtgaccgcgaacaccggcgccttggcgcggaaacgcgacaggtaacgcgcggtgccgccggattcggtcatggccacgatcgcgcgcacgcccacatgctgcgacaggaacatggtggccatggcaattgcctggtcggcacgttccaggttgcgcggcgaggcgttgaaatcggtctcggtctggaactggcgctcggcacccaggcagatgcgtgccatcgcttccaccgccttgaccgggtaggcaccggcggcggtttccgccgacagcatcaccgcgtcggtaccgtcgatgaccgagttggcgacgtccagcacttcggcgcgggtcgggatcgggctttccaccatcgactgcagcatctgcgtggcggtgatcaccaccttgttctgcgccagcgaggccttgatgatcttcttctgcaggcccggcagctcggcatcgccgatttccacgccaaggtcgccacgggcaaccatcaccacgtcgctggcctcgacgatttcttccaggttctcgatcgcctcggtgcgctcgatcttcgacaccagggcggcatcacagccgtgcgagcgggcgatgtcgcgcgcgtcgttcatgtcctgcgcgttgcggcagaacgacacggcgatgaagtccacgccgatcttcgcaacgataccgatcagttccttgtcgcgctcggtcagggcacccagcgacaggccgccgccctgcttgttcaggcccttgcggtcggacaacacaccatcgttgagcacggtgttgacgatgcgctcgccctgcacttccaccacctgcagctgcatcaggccgtcgtcgagcagcagcacatcacccgggcccacgtcctgcggcaggccgaggtagctcacgcccacctggctggcgttgcccgggccggcgttctcgctggcgatcaggtcgaagcggtcacccgccttcagctgcaccttgccttcggcgaagcgctcgatgcggatcttcgggcccggcaggtcggccaggatgcccacttccacgcctacgcgggccgcagcagcacgcacttcggcggcacgcttggcctggccggacggatcgccatggctgaagttcaggcgcaccacattgacgccggcgcggaaaagatcctccagcacgcccggcggatcagtggccggaccgagggtggcaaggatcttggtgcgacgctgacgctcgaacatggtggatgggcctctcccgttaaagaacggaaattagcacatccttcacgccgcatgtatacggttacagccttgtgctgcctgactccgcaggtcatgcaacggacattgtccggacatacgctggcgcagggcattccgtagagccgagcccatgcccggctggccactcgccggagcagccgggcatcggctcggcgctacagggagctaggccagcagcgtttccagctgcgccggttcgcgtgccagctggccagcgccggccgcggtgagttccgcctcaccgccaaagccccacagcacacccacgctgcgcaggccgtggtgacgcgcgccttcgatgtccatgcggcggtcgccgatcatccagcactgtgcgggctgcacctgcagccggcgcagagcttccccgaccagctccggcttgtggctgcgcgagccatccaaggtcgaaccgatgatctcctcgaacagcccgccaaacggcaggtgcgcaaggatgcggcgcgcatgcggctcgttcttggcggtgaccaccgccaggcggtggccacggccatgcagcgtgcgcagcgtgtcttccacctgcgggtacaccgtgtgttcacgccagccttcgacgtcgaagcgctcacggtagtagcccaccgcctgttccacccgtgccggttcgacgaacagcggcgcgaaggtggtgcgcagcgacggaccgatccagcccagcagcgtctcctgcggcggcaccggatggtccatcttctgcagcgcataggcgatgcaggcggtgatgcccacctgcgaatcgatcagcgtgccgtcgaggtcgaagaacaggacatccttgctacggtcggcactcatgcgccgcgcgcgtcgagcgcggcgacggccggcagggtcttgccttccaggaactccaggaacgcaccaccgccagtggagatatagctgacctgtccggcgatatcgaacttgtcgaccgccgccagggtgtcgccaccgcccgcgatggagaatgccggcgagctggcgatggcgcgggccagcgcttcggtgcccttgctgaaggcttcgaactcgaacacgccgaccgggccgttccagaccacggtgccggcctttccgatcagctgcgcgtactgcgcagcggtctgcgggccaatatccaggatcaggtcgtcctcggcgacggcgtcgaccgccttcacttcggcgacagcgtccggcatgaactgcttggcggtgaccacgtcgaccggcagcgggatgtcggcgccacgcgccttggcatcggccacgatcttcttcgcggtgtccagcaggtccggctcatacagcgacttgccgactttgtagccggcggcagcgatgaaggtgttggcgatgccaccaccaacgatcagctggtcgaccttgccgaccaggttggccagcagttccagcttggtgctgaccttgctgccggcaacgatggccagcagcggcttggccggtgcgtccagcgcctgcgccagcgcgtccagctcggccatcagcagcgggccaccggccgcgaccggggcgaagcggatgacgccatgggtcgaggcctgcgcgcggtgtgcggtaccaaaggcatccatcacgaacacgtcgcacagggcggcgtacttcttcgacagggcctcgtcgtccttgccctcgccgacgttcatgcggcagttttccagcagcaccagctggcccggctgcacgtcgacgccgtcgacccagtcacgcaccagcggaacctcgcggccgagcagctcggacaggcgctgggcgaccggcgccagcgagtcggcctcgctccacacgccttccttcgggcgccccaggtgcgaggtgaccatcactgccgcgccctgctccagcgcgcgcttgagcgtcggcagcgaagcggtgatgcgctgttcggaagtgatgcggccattctcgatcggcacgttcagatcctggcggatcagcacgcgcttgccggagaggtcgaggtcggtcatgcggacgatggacatgggcaactctttggctcagggacgggatgccgggctacggcaggcggccattgtatcgggtgcggctggtgggagggccgatgcctgcggcaggcagaggcgcacggcaacagcaacggcaacagccaaagcgctggcgcttcttggtgctgagggtgagccggggtgctgtggggtggcaggggacgccgtaaacccgtccatgggggcttggtcgccgcatccatgcggctcacacccctgccaccccacaccatcccggccttgacaggttcatgaggcggagcggatggcaaaggcaggagcaagagcggtttctgatgtcggagaaactaatgtagagccgagcccatgctcggctgggtctaccgcgagcagcagccgagcgtgggctcggctctacaaagagcgcccagccaagcagcttttgctcttctttttttctttccgtgggtggacgcacacggaaactgtcagaggccgggcgggtgggctgggcaggggtatccgcgccatggatggcgcggctaagcctccagggacggattcacggcgtcccctgcccagcccacccgctcggcccatccccgggatcgcgctttgcagccacccacgaggggctgcgccgttcgccggaacctacgccgaaggcgccggcttctgccgaagcaggctgagcgccaggccacccaccaccagcacgcccagacccagcagcgcccacaacagccacgacttccagtcatgctgcggtttcagcgccgcgtcgcccgccagcggttccgggctgccttccagtcgcgccagcgtcggctgccacgacggatcgttgcgctgccgaagttcctcgatcaacaccccgatcggcgcgtccgtgcggcgcgcggtcgcgctgcccaccgccagtgcgtagggcgccgcaccctggctcaggaacaccagcacttccggttggtagcccaggcgcagcgtcggcgcagtggcagattccgccggattcgccaccagcttccagtagcggtcgcggtgcacgccgcccagcggctgcgccgccgactgctggcgctggccctgcgtgccctgttgcacctggtaggcgatccacggcgcgctgcggcgctgccactcggcactctcgtcatcacgactgaacagcgtccattgcaccaggctgttgtcggtgctggccacatcggcgcgcgccaccgggaaccggccatccatctcgaaggtgtattcgcccttgcccttcgacgtcggctccagcgacagccattcccacggcagcgtggccggcgctggcggcagttccgccaacacgccgcgcagggtcggcagccgcgagtcgccctgcgccaggatgcgcaggtagcgtgcagtgccgtccacctgcaggcggcgctgcagcaggcgcttgccggcgcgctgcagatccaccagcggcacgtcgcgacccatcgatcgccagtgctgcaggtcatcactggcatccagctgaacctgcgcctgcagcggctggccgctgtcggcccagtccagcaccagcgccgccagcggctgctggtcgagcatgctggcgtcgatcagccagccgccctgcccgttcgccgtcgccccgccactcacccgtgcttcgacccggcgcacgcgcccatcggtatcacgctcggtcagcagctgcagatcgttgcgctgggcatcggccagcggcgggagcacgaaccacggcagttcacgctgcaccggcggttgcgccagcggctggtccggcgccagcagtgccgacggcagcagctggctggctgcattgaacacctgcaggtcgctgaggtcgggactcacggcacggcggtagatcgccggctccagcacgatgcggtaggcaccggactgcgcgctggacaatgtgagcggccattgctcggcatactgcgtgcggtaatcagccgcctgcaccacgacggcggccagcatgccgaacatcgccggcagcagcgccctgctccacttcctcattgcttttcctccacggtcggcgccacgctcggcggagccggtgccagataacccacgaccgtgcacagcaggccgtaggcgatgaacgatgcgatgcccagcaggttgcccaggtgctggcgatcgacaataaccagcttggccagtaccacgcccatcagcacggcaccgaccatccacagcacacgctggccacgacgcgaaccccacacccaggcaatcacgcccagcacgctccacaacacggtcaggctggtctgggccaggctgaagcgcatcatcgacgcgttccacgccagcccaccccactggtgcacgccatgcagcaccaggctggtcagcgcgacgaaggccgccagtgccagcagcggcatgcggatgttcagcaatgcctgcggggcctgcgatccctgattgctgtacagccagcgcgccagcagcaacaggctcaaccattggccgatctcggccggattcagcaccggcagccacaacagcggtgcggcgtcgcccggcagcagctggcccaacagccagccgatcgacagcaggccgaacagcacgcactgcagcgggacgcgcacgctgtcgaaggcctgtcccaatggccagcgcagcgcattccagcgccacagcgacagtgccgccatcagcagccatggcaaggtcaccagcagggtcgtccagccctgcgccagatcggcttcgccaccgccccacagggccagcagcgaaagcagcgacggccacagcagccaccataggaactgcgcgatgcgggccacggtatcgccgccctgacgcaggcacagcagggtccgcacgcccagcaccgcgaacaccgcccaggccagcgcgccataaccggcgaacggctggtggtgtgcatcgctctgcatcagggccagcgggaagcccagcgcgagcatggccagtgcggtcacgcccagtgcacgtgccggctggcgacgctgcacttcggccaccagccaggcagtgaccgcggccagcaccagcaacgcgtccacttcggtgcggtacgggaagaagcgggtgatctcatggaccaggccgcccagccaccacagcaggccccacaggtagtacaccagtgcgacgtcatgacgtggcctgcgctggtagctccacgccgacgcgaagccggccagggccagcaacagcgcgccgatggcggtcgggttgatcaggaagcgcaggtcttcgtgccagtggtcgccaccggcaacgaaggcgaatgcggcgccgatctgcagcaacgcgccggatacctgcggcagccagcgcttctggcgcagccccaaccaggccaggcctgcaccttccagcgcaaacacggcaccggtggcacgcgccgacaaggccagcggcaccgccagcgtggcgaggcccaccgcaagcacggcatgcgattgcgccagcacggtataggacgcgcgtgcgatcagtgtccgtgccagtaccgcgtagatcgcggccaggcccagcgcgcatagtgccagcgtcatcggttgttcgtgcagcatgcctgcctgcaacgagaatgcgaccagcggcgtgccgaacaccaggctgccatcgatcagatcgcgccggctggccggctggcggcgcgcgtacagcagcgggatcagcaggtagaacacgaagaacaacagcaggaacggctcagtgctgctgaacttgtccggtacgtactgcagcacgccccagaaggtgccgatgccgaaagtgaaggcgaagcccagcaggttcagcgcgcgccaagggcggaaccaggcgatggcgaaaatgcctgcgttgagcaccgcgtaatagctgaacagccccacgtgattgccgctgccggcggacagccacagcggtgccatgaagccggccaggatgcccagcacggccagcgtgcgcgagttctgcaccaccgccagcacgcacagcccggccaccagggcaatggagctggcgaaggcgaagcccggcggaatcaggtcgaagcgcttgaaggccgcgaagatggtcagcagcagtacgccgatggcaccgccctgcaatgccagcgcaaacaggcgccggcgctcgcgctggtgccaaccaaaggccagcaggcccagcgcgcccacagtgatgccggccaggcgcagctcgatcggcaacaccagccagccctggtcgctgacgtacttcagcagcgcagcgacaccggccagcagcaccagcatgccgatcttgaccggcacgttgccttcggtgaaccagcgcttgaccgcaccgatgccgcgctcgatgacgttgggcagtgccggctcggaaggcagcggcggctgcaccggcaccggtggcaccggcggtggcgcagcaggtcggggaacaggcgcctcggtcggcgctgcttcgcgcaccggtggctgcgtggggtgcggcgcagcagcggcgaccggccgcaggaacggtggatcggcactggccgtgggcgtggccgcagcccgttcaggcgtgggcgcgctggcggtggcaggcgcggcggccatcgcgctttccagcgccgcgacgcggcggcgcaggccggagatcatcaccagcgccaccaccagcagcagggggatggccaacaggaccaatacgaccagtgcgatcagtgcttccattgcgtgcttccattgcgttcccgcgccccagcggcagcggtcgaccgccccatgctacgacagggtgggccccttaaacgacgaaccccggccaggccggggttcgtctgcgatctacgccggccttacttggcggcgatgaccttggccatttccaggcacttgttcgagtagccccactcgttgtcgtaccaggtcaccagcttgacgaaggtgccgtccagggcgatgccggcatcggcgtcgaacaccgaggtgcaggtttcgccgcggaaatcggtggccaccaccttgtcttcggtgtagcccaggatgcccttcagcgggccttcgctctgtgccttcacttcggcgcagatctcggcgtaggtggcttccttttccagctcgacggtcaggtcgaccaccgacacgtccgaggtcggcacgcggaagctcatgccggtcagcttcttgttcagttccggaatgaccacgccgacggccttggccgcaccggtggacgagggaatgatgttttccaggatgccacggccgccgcgccagtccttgttggacgggccatcgacggtcttctgggtggcggtggccgcatgcacggtggtcatcaggccgcgcttgatgccccacttgtcgttgatgaccttggccagcggggccaggcagttggtggtgcacgaagcgttggagatgatcgcctggccggcgtaggtcttgtcgttcacgccgtacacgaacatcggcgtgtcgtccttcgacggggccgacatgatgaccttcttggcgccggcatcgatgtgcttctgcgcggtttccttggtcaggaacaggccggtggcttccagcaccacatcagcgccgacttcatcccacttcaggttggccgggtcgcgttcctgggtcaggcggatcttcttgccgttgaccagcaggtcgttgccctgcaccgccacgtcggccttgaagcggccgtgcacggagtcgtacttgagcatgtacgccaggtagtccggctccagcagatcgttgatggccacgatttcgatgtcgtcgccgaagttcagcaccgccgagcgcaggacgttacgcccgatgcgaccgaaaccgttgataccaaccttgattgccatttctcaagctcctgcggccgcgacaggtgcggcgggatggatagggcccacaagtctagcaaaccgccgctggccaccgtgggccagccgggaccgccggccggcccacggacaggatttgatccggatcaaagcgttagcgcggcgtgaggccgagactgtcgccatccacccagcaacgagaacacccccatgcgcaagacctcccccctgattgtggccagcctggccgccgccctgtcgctcgccgccgccccggccatggcccagtccaagggcgactggaccgtctcggccggcgtgcaccaggtggcgccgaagtcgaacaacggctggctggccggcggcaccctgaaggtcgacgtcgacaatgacgtcaagccgaccatcaccggcgagtacttcatcgccgacaacctgggcatcgaagtgctggccgcgctgccgttcaagcacgacatcaacatcaacggcctgggccgcgtcggcagcaccaagcagctgccgccggtggtcaccctgcagtaccacttcaacagcaagggcaaggtgtcgccgttcgtcggcgccggcctgaactacaccaccttcttcagcgaagacactacgggtgcgctggccggcagcaagctgaagctgcaggattcgtggggcctggccgcacacgccggcgtggactttgcgatcggcgagaagggcgccctgcgcgtggacatgcgctggatcgacatcgacagcaaggtgaagttgaacggcgagaagatcggcacggtcaacatcgatccgctggtctacggcgcttcgtacgtcttcaagttctaaagcggtgtattgggcgcggggggcttcgcccccgctcccccgctacacgcaaaaccctcgcagcatgttgccccggtaattgccggggcttttttgtgcctgggactgaagcggttccggagctggggcaaggcagggagcggagccgggacacgccgtaaacccatccctgggggctcgatggcgccatccatggcgccaacggtcccggctccgctccccgccttgccccttcccatcaccgcgtgcgtaccagctcaagcaaaggcaagagcagaacccgtgcatccgtggcgcagtgattgcctgtaattgcaggaggccgattttgatcctgcatttgtttttgatgttgcatttgacgtttgcatccgcctccgcggccatgtttggaggggagcgcagagggaggggcggcgggaccgttggcgccatggatggcgccatcgagcctccaaggacggatttacggcgtgtcccgccgcccctccctctacgcttccacttcggaacaggaacgcgccgctcttcaatccacctaccccgctagaatgggcgcatgaaagccctgcactccctgttcctcgccgccgccctggcgccggccctgctgtccgtctccgcccctgcccatgcctggggcgcgcaaggccaccgccttgtcgccgaagtcgccgacgcccgcctcacccccgccgcccgcgccgaagtggaccgcctgctggccaccgaaccggacgccaccctggccagcatcgcgccctgggccgaccagctgcgcgccaaggacccgggcctgggccgtcgctcggccggctggcactacgtcaacattgccgaagacgactgccactacgaagcaccgaagcactgcaggaacggcaactgcatcgtcgaagccctcaaggcgcagagcgccattctgggggaccgcagcctgactgacggcgagcgcctgcaggcgctgaagttcgtcgtgcacctggtcggcgacatccaccagccgatgcacgctggctacgcccacgacaagggcggcaacgatttccagctgcagttcggcaaccgcggtaccaacctgcactcgctgtgggacagcggcatgctcaacacccgcaagctggacgatgccggctacctgccggtgctgcagagccagcgcgcaccgaagctggcgcgccagtccaacccgcagcgcgacccgcaggtctgggccgaggccagctgccgcatctccatgcaacctggcgtttatccggcctcgcgtaaaatcggtgacgagtacaccgagcgctaccggccgctggccgaagcgcagctgcggctggccggtgaaaacctggcgcagttgctgaaccgcgtgctcggcacgcgctgaggagagctccaatgccggtccaggtgcagtcgttcttccaccgtgacagcaacaccttcagctacctggtcagcgacccggccagcggcgaggcggcgctgatcgatccggtcctggactacgacccggacaccgacgccagcagcgaatcaccgctgcgcgcggcattgcaggccatcgaacaacagggcctgcagctgcgctggctgctggagacgcatgcccacgccgaccatgtgtcggccgggcgccggctcaagcagcgctttccgcaggccacgctggccatcggtgaaggcatccgggcggtgcaggcgacgtttgcgccacgctatggcctgcagcttccgggcgccgatgagatcttcgaccacctgttcagcgacggcgagaccttcactttgggcgaactgcgctgccaggtgatcgccgtgcccggccacaccagcgacagcatcgcctacctgatcgacgatgcgctgttcactggcgactcgctgttcatgcccgacggcggcactgcccgctgcgactttcccggcggtgatgccgcacagctgtaccgctcgatccagcgcctgctggccctgccggatgccacccgcgtgttcgtctgccacgactacggcccgggcggccgcgacttcgccaacgaaaccaccatcggtgaacagcgcgcgcacaacatccacgtgcacgacggcgtggccgaggcggagttcgtcagcgtgcgccaggcccgcgatgcgacgttggaagaaccgaagctgatgcagcctgcggtaaaggccaatatccagggcggggcctgacgtacgccgggcagagcccggcgccatcggtttccatcgcggaccgcgagcgttcattttccctgcatccgcaccacgtgctggcccttcacgatctcgaacgtgaaggcgtactgcagggtgaccgctaccggctcgacgcgctcggcgccccggcagtcaccgcggtcggcaggcaccttgcccgccgcgaagtggcagaccgctgcggacgagtacttccacatcgccacggcttcctgggcagcctgcagcaggggcgcattctcgcccgcagcacctgccgcgcactccggacgatcggtcaatggcaggcttcgctccacggcgccattggcatcaaccaccacctgcaggcagatcgtggtcggcgccagttccgcgcgcgggtcacgatcgccaacctccgggtctggtgccgcgtacagctggggcatccggtagccttcggtcgcacccagcgaatacacctgcgactgtccaccgccgctgcccgcctgcggctgcaggcgctggtggccgacattttcgctgcgggtatccaccgtggtcaggcggtcctggctcgcacaccccaccagcagcgctgccgccatgatcagcgcagcggacttcattgggtgtcctcggtgttgtccatggcgaacgtgatcggaatcttcaccgccgctgcaaccggcttaccgttcttcatcgccggccgataggtccagctgcgtgccgcagcgatcgacaccgcatcgaacacgcccggattggtggcactgagcacgcggacatcgctgggacgcccctgcgcatccacctccacgcgcaggttcaccacacctacctggcgctgctcgaacgcggatttcggataggacggcggtggcatcctgtcgatctggatcggacggtccagcccagccttggccgcaccttcttccgccgttgcgtacggctcgacaccgatccccgggctcccggccgcgccgccctggctggcccatgccaccgcgcccatgcccacacacaacccgaccaccagcacctgcccggacacccacggcaatgccttccgtttggactgcttcaacatggcgatacgctccttcaacacgggttggctgcgccaatggcagaccgcgggcgcaaccgggtggaccagctgcgccttcagcagcgtgctggcgtagaggccgcgcagcgccggctgcggagccatggtgcgggcatcgcaggccagttcctggtcgcgcaggaagcggcccgcagcccacggcagaagcgggtggaaccagaacaccgcgcgcaccagcagcagcgcaccgttggcccagtgatcgccatgacggtgatggctgcgctcgtgctgcaggatcaagctctgttcctgtgcggtgaactgcaggtcgaagtcgggaccaaccacgatgcgtgggcgccacaggccaaccagcgcgggcaagccgggatcgccgctggcctgccagctgccatcggtgcgcggcgtcagtggccccatgctccgttcgaaacgatgttgtgcgtgcaggtcgcgcaacaggcggatgcccgcacccaatgcccacagcgcgaacaacagcccggcccatggcaacgagggcccgctcagggcatcgagggcaccgggcatcactttcagcggcagcgtgggtacctgctgcaacaccgcaacctgtggcaatggcagcgtcagggccaccagcagcagcggcagcagccaccagctgcggtaggccagcccagcgccccccaaccgcaccagcagcggtcgcagcaccgccagcaggaccacacccacggccagccacaagctggcccgccacagtccgtcgagcagctcagtcatggtccagctcctggatcagcttcttcagttcggcgatgtcctgcgcgctcagctggccgcgttcgctgaagtgcgcgaccagcggcgccacgcgcccttcgaagacacggccgatgaagtcctggctctgcgcctccacccacgcctgtcgctgcagcagcggccggtacaggtaacgccgtccatcgcgctcggcagtgatcgcgcccttggtcagcaggcggttgagcagggtcttgatggtcggctcggcccagtcgcgatgggccagcgcggccaccacgtcatcggcactacgcggtgcctgctgccacagcacctccatcacgacggcttcggcttcgctgatcggggtcatggtttacatccgtaatcgacatattgattacgcgcgtaatcgaactgcctgtcaagcccctcgactccgggttcatcccggctgcgccagcatcggttcctcccgcccctggccccggatgaaagcactgccgaagaaggatttcccggtcgagcaggcccgccgcttcctcgaacccggcccgatcgtgctggtcagcacggcatggcgcggccagcgcaacctgatgacgatgggctggcacatggtcatgggcttctcgccttcactggtcgccacctacctgtgggacgcaaaccacagccacgcgttggcgcgcggcagcggcgagtgcgtgatcaacgtgcccggggtggagctgctcgataccgtggtggacatcggcaactgcagcggccgcgaggtcgacaagttcgcccgtttcgggctcgacgcactgcccgcgcgtgaggtcggcgcgccactggtcggccaatgccattcgtgcttcgaatgccgcctgtacgacgacagccaggtggcagcgagcaatctgttcatctgggaaatcgtgcacgcccatgttgcgccccggccgaaactgccgcgcacggtgcattaccgcggcgatgggcagttcatggtggccggcgcggaagtctcgcgtcgacggcggttcaagcccgacatgctgtaatgcccgcactcccccgacgcaggaccgccgcgcatgaccgaacacctcaccgacctggacgccgccgtcgactggttgtttgcgcgcgtggacgggccgctgcggatcggggcaccgctggcactgggcaagccgcatcggctgctcaatgccctctacgcgcgcgtcgagcatgatccgtcgcggccgctgcagctgtataccgcgctgtcgctgaatccgccgaaggcgcggggcaacggcctggaagcccgcttcctggcaccgttcgcgcagcgccatttcggcgacgacttcccgcgcctggcctatgccgatgcgatcgcgcgcgacgcgttgcctgcacatgtgcaggtggaagagttctacatgcagtccggcgccctgctcgggtcgcgtcaggcgcagtccagctataccagcctgaactacacccacgccgccgatgcggtggcgcagcgcgcgccacaggtgatcgtgcagaaagtggcgatgcgcccgaacgaccgccggctttccctgtcgtgcaacaacgacatcacccaggacacgctggacgcgatgaccgcgcgtggcctgccgcgtccgctgctgattgccgagatcgatccccagttgccctacctgggcggctcggccacggtcgatgtctcgttcttcgatctggtgatcaccccaccgccgccgtacccggcgctgttcgggctgccgcggcagccggtcggcgatgtcgactacgccatcggcctgtacgccagcacgctggtgcgcgatggcggcacgctgcagatcggcatcggtacgctggccgacgcgctcagccatgcgctggtgctgcgccacaccgacaacgcgcgctaccgccgcgtgctgcacgcgctggatccgcagctggccagccacccgctggtgcaggagatcggcggcgtggacccgttcgaagtgggcctgtacggctgcagcgagatgctcaacgaaggcttccgcaggctggtgcagaccggggtgatcaagcgcaaggtacacgatgacctggcgctgatgcagcgcatcgagaacggcagcacgctgtcgatcgaccacgccacactggcggccgaaggtgagtacctgcacggcgcgttctacctgggctcgccggaattctacgagtggctgcgcacgctgccggaggacgagtgccgtgcgatcggcatgcgccgcatcagcgagatcaaccagctgtacggcggcaacgaaacgctggaacgcctgcagcgccgccatgcgcgcttcttcaactcctgcatgatggccaccgcgctgggcgcggcggtgtccgacgcgctggacgatggacgcgtggtatccggtgtgggcggccagtacaacttcgtggcgatggcacatgccctgccggaagcccgcagcgtgctgatgttccgcgccgcgcgcgatgacaagggccgacgcgaatccaacgtgcgctggaactacgggcacaccaccattccgcgccacctgcgcgacatctacctcaacgaatacggcattgccgacctgcgcggactgaccgacgaggactgcgtgcatgcgatgaccgcaatcaccgaggccccgttccagggcggcctgctgcagcaggcgcacgcctcgcgcaaactgctggcggtcgcgcaaccggatccgcagcggcagcagcgcaatacgccgcaggcgctgacagcggcgctggccccgttccgcgccgatggcagcctgccggactatccgctgggcagtgacttcaacgagatcgagcaggtgctggtgaaagcgctggcgtggctgaaggccaatacgcagacccgcggcgacaagctgcgtaccgtctgggcagcactacggcaaccggccggcgacggcgatgcggtgtacctgcagcgcatgggcctgcaggcaccgaaggatttcgtcgaacgcctggacgcgcgcctgctgcggctggcgctggcgcgcaccgcctgagaaaaggggacggaggggattaagtcgtttgtgcacaaacgacttaatcccctccgtccccttttctcatccatgcatggcgcggatctactgaccaatccttactgcttcctcaagatacaggcgggcaatcggtggatgcgctcgatgctcgacctgccacagatcatatgccgcctgcatcgccagccacatgcgggcattgcccagacctgcaagttcaagacggtacgcgagttccgcggagataccggcgtgcccgttgatgatggtcgacagctgtccgcgcgaatagccaagatgctgcgccaacgcactgatcgacatgctgatcgccggcaggatgtcttcgcgcagcgattctccgggatgcggcggatcatgcaacggcatcgagcagcctcttagtggtagtcaaggtaatcgaccagttcaacgtcaagcccacgaaagcggaacaccaatcgccaactcgccgagacacttacagcccagtagccgctatagcttccgcgcagggggtgcaggcgatttccgggaagccccatgtccccaggcagccgggcctgatccagctgcagaagcaaacgccgcaaccgagccacatgatcggcacggactccggaaatgtcgccccgctcatagagcgccttcaggcccttgtgcctgaagctgacgatcatgcagcgcaagtgtaaggcatgaccttacaccccgcaaatccaccgtggttttctgcgccgcgcttcttatccatgcctacttctgagggttcctcggcaggtcctcttttcgcagagaacgcaggtcagatgaagaggccaacgcgacgccgggaccgtcgggtggaacatgccggacaaagaaatagggacggaggggattaagtcgtttgtgcacaaacgacttaatcccctccgtcccctttttcctgcggcaaagaaaaggccggcgtgcgccggcctttcctcattacgtcgcgatgctgcttacagcgccttggcggcttccaccacgtgcgcggtggtgatgccgaagtgcttgtacagctggtcggccggggccgaggcaccgaaggtgtcgataccgatcacggcaccgtccaggccgacgaactggcgccagaagccggtgacaccggcttccacagccacgcgcttgcgcaccgcgttcggcagcaccgattcacggtaggccgcatcctggcgcaggaacacgtcggtggacggcatcgaaaccacgcgggtcttgagaccagccgcgtccagctgggccttggcttcggtggccagcgagacttccgaaccggtggcgatcaggatcacatccggggtaccggcggcatcggccagcacgtaaccgccgcgctcgatctgcgcgatctgctcggcgctgcgcggctggtgcggcaggttctggcggctgaacaccaggcagctcgggccgtcctggcgggtgatcgcggccttccagctcaccgccgactcgaccgcatcgcacggacgccacacgtcgttgttcgggatgtagcgcagcgaggccaggtgctccaccggctggtgggtcgggccgtcttcgcccaggccgatcgagtcgtgggtgtagacgtggatggcgtgcgccgggatcagcgcgctcatgcgcacgccattgcgggcgtaatcgctgaacaccaggaaggtggcgtcgaacggaatgaagccaccgtgcagggccaggccgttggcaatggcggtcatgccgaactcgcgcacgccgtagtacacgtagttggcgttggcgtcgtcgctggcaaccgatttgctgcccttccagagggtcaggttggagtgcgccaggtcggccgagccgccgacgatttccggcagcagcggggcataggcttcgatggccagctgcgaggccttgcgcgaggcgatcgtcgggccttccgcggccacctgggcgatgtacgcatcggccttggcaacgaagtcggccggcagttcgccatgcgagcggcgggtcagttcggctgcttcagccgggtactggctggcgtacttgtcgaacagctgttcccactcggcctgacgcagggtgccggcgccattggcgcgccagccgtcgtagatcgcctgcgggatctcgaacggaccgtattcccagcccagctgcttgcgggtggcttccagctcgtccttgcccagcggtgcgccgtggctggattccttgcccgccttgttcggcgaaccaaacccgatggtggtgcggcagcagatcagggtcggcttgtcgctctgcgacagcgcggcctcgatgccggccttgatgctgtccgggtcatggccatcgacgtcgcggaccacgttccagccataggcctcgaaacgctccggggtgttgtcggtgaaccagccctcgacgttgccgtcgatggagatgtggttgttgtcccagaagcagaccagcttgtgcaggccccaggtgccggccagcgaagcggcttcatgcgacacgccttccatcaggcagccatcgcccatgaacacccaggtgcggtggtcgaccacttccagctccggacggttgaagcgctgtgccagcagcttctcggccagggcgaagcccacggcgttggcgaaaccctggcccagcgggccggtggtggtctccacgcccggggtctcgtggcgttccgggtgaccggcggtgtggctgcccagctggcggaacagcttcagctgctcgatcggcaggtcgtagccgctcaggtgcagcagcgcgtactgcagcatcgaaccgtggccgttggacagcacgaaacggtcgcggttgaaccagtgcgggttgctcgggttatggcggaggtagtcgttccagaggacttcggcgatgtcggccatgcccatgggcatgccggggtggccggactttgcggtttcaaccgcatcggcggcaaggaagcggatggcgttggccaactggcgacgggtaggctgcgtcatggttctgtcggaatcgggaggcggccgcggacgtgcgggcggcctattgtcccatagtcgccgggcggggggtcagttcaccttgcccggtcgtgccggccgctggcccgcaaggacgtgatctccgccggattccgcatgtgaaaagaggccggagccctttccctgcggaaaggaatccgaccccgatcaggtcgccagcagtggcgttggactcagtcctgctgcggacccagggccgggccatcgtgcgactcgcccttggccaccagcgtggtcagggccaggtcgccggtcacgttcagcgcggtacggcacatgtccaggaagtgattcacgcccaggatcaggccgatgcccagcggattcacaccgaccatcgcgcagatcatcgccaccaccggcagcgatcccgacggcacgccggcggtaccgatgccaccgaggatgcagaccgccatcaccatgatctgctggccgatgctcaggtccacgccgaagaactgggccaggaagatcaccgtcacaccctcgaacagcgcggtgccgttctggttggcggtggcacccacggtcagcacgaagcgcgacacgcgctgcggcaagcccatctggtcggccacgcgcagcgcggtcggcagggtggcattgctggaggcggtggagaacgccatcaccgttgcttcctgggtatcgcggaagaacgacagcggcgagcggccggacagccacaccgcggtaccgtaggtcacgatcatgtgcaggcccagcgccagcaccaccacgcccacataggcacccaggcggatgatcagctcgaagccgaacagcgcggccaggttgaacatgaagcaggccaccgcataaggggccaggcggatgaccaggttgatcagggtcatcgagatttcgaacacgccttcgatggcgcggcgcagcggggcaaccttttcattgtcggtcagcaccatgccgatgccgaacatcagcgcgaagaacatcagcgacaggatcgcgccgttgtccgacgcggcctgcagcacgttgctcggcacgatcgacagcagcatgtccatgcccttcggcgtgccgtggatgccagcgacgatttccttgctgcgctcggcgttctccgagagcatcagtgccgcagtctgcggatcgacgcccgcgcccggcttgagcaggttgaccagcaccaggccgatgcccaccgcgatgccggacagcagcacggtgtaggccagggtcttccagccgatgcggccgagggcgcggatgtcgcccatctccgacacgcccatgatcagcgccgagaagatcagcggcacgatcagcatgaagatcaggttgaggaacaggcccgacgccggggtcgtgacgtagtccattacccacttggcaccagcctgcagaccatcgacgctgccgcccagggcgtgcacgatcagtcccaggaccaggccgatcgcaaagccgatgcccatcttccaatgcaggggcaacttcttcttgtcggcagcagctgctgtcatacgcgggtttcctcgaaaaatgaatgcactctaacaaagcgcgcaagcggcgccggttcaggttcgccgcggcggatacagcggcgccaggtcagtgtcggcggtgcccacagccgccgcccagtgcggtccgtcacggaagacctcgcgcaggcgcgtgcgcagcggcgccagatccccctgcccgccccaccgcgcctgctgcaggtcctgcagcacctgacgctgggctgcatccccaagccgcgcgatgacctgctcgatgcgttccacaccagccatcgcacacagctgtgcttccacctggtcgaagccctcgccatccagcgcgcggcgcagttctgccaggccggcacgcccgcccgccacagtcggcacagagggcttgcccgctacaggcgccactgcgcgcgggcgccgacctcgctgccagccccacaggagagtcagcagccacagcaacgccaggccgatggccgccgccatccacggccacggacgcccggacaggccgctggcacgcggatcggtcgcggcgatgcggctgtcctggccatcggcgcccggcagcgcggcatcggtgtcgatcggcggcaatggcgccggtgaggcagtgccggtgccggtgccggccgcgacggccagcgtcaggtccggcagcttcgcctcctgcgccctgccgttacgcacatcccaccagggcaggcgcggccccggcaccaccagcgaacccggctggcgcggcacgatcgaatagcggcgggtgatcttcaggcgcggcgtgctgccgttgaaggtctcttcgtactgtgccggttcggcgaacacctgcgcattggtgccgacatccggcaccggcaggtcggtgaactgcgcgcgcgtcgcgccttcggcaaccgcttcgaccaccacgttggcggcctcaccggtgcgggcactggtcggcgcactggtgtagcgcagctgcaggctctgcagtggcagccacggctgcggggcctgcgccggctgtgcctgcacctgcagcgtgcggtctgcgccggtggcattcatgcggccatcgccaccgccgaagaagtcgtcgaagaagccacccgcactgcgcccactgaaacgggcaccggccaggcgcaacgcgccgctgcgctcggggatcagcaggaaacgccgttcgaccacgttgtagcggcgcccgttgacctggcgtacatcggtgcggtcgtcgcccacacgctgcaacgacgcgcccgccggggtatccagcaccagctcgccggaggccagctgcgaggcgaagtacagccgcaccaccacgcccacgctctgctgcacatacggcgtatcgtcatcgacaacggtttcgatgaaggccatcgcattgctgtcgggccccgccacggccgccgcatcgacctgcagcgtcagcggtgcggtgcgcacactgcccacctgcaggcccggtaccaccagcgcaccactacgtcgtggtgtcagcgccacgccatacaggttgcgctgctgcatgctgccattgctccattccacctggcggctgctggtctgcccgctcaggtcgaagtcggtgcgcaatggcgtgaagtcaggggcgccctggtcgctctcgacattgagcgtgaccgtgtcgcccatcgcgatgcggtcgcggtccagccacgcgcgcggctgcgcccaggccagcagcggcagccacaacagcagcgccgccagtacctgtcgaggccagtgcccgtgcatgttgatcgaccgcgtcatcgcccttccctcttcctgcgttcgttttccagctggaacttggcccgcagcaatgcgcccggatcatccggcacacgccgcatccatgcctccaccgcctgttgctcctcgcgctggcgcggcgtgcggccctcaccacccggcactggcttgccccccttgccggcctcaccctcgcgtgcctgctgcatcgcctgctgcatgcgctggcgctgctgttcatcggcctgcgcctgcgccttggcatcttccacctgcggtggtgcctgctggccatcgcggccacgttcgccaggctgaggctccgactgcgcgttgttgtcacccgccttgggctggccctgctggcccgacggcggctggccctggccgggttgctgctggccctgcttcggctgtccctgtgggttctgttggccctgcgggccctgcggttgtttctgctgcccgttgtgcggtggcttctgttgatcctggccttggccgcccccggatggcctgcgcttgcgtgcagcatcgaccacggcgcggttggccactgcatcggccatgcccggatgcagcgccagtgcgcggtcgtaggcggcgatcgcttcgtcgtagttgccttcgcgtgccagcgtgttggccaggttgtaccaaccggcatcgctgtcgatgccttcgaactgtctgcgtgcagtggcgaagtcgcccctgcggtaggcctgaaccccctcggccaggcgttgatgctgcagctggtcgctgcgcttccatagcgtgccctgcgccggctgcgagacaggcgtcgcaggggcctgcgcctgcgcgtcattcatccatggcagcagaccgaccgcgagcaccgcagccagcaccgcgcgacggcggaaggccagcaatgccagcagcattaccggcggcagcaaccagaagccttcgtcacgccactgcttgccttcgcccggccgctgcgccgccgtgccgtcgcgcgcgtcgagtacaccgagcgcacgcagatcgccgtcatcggcagagatgcgcgcatagcggccgccaccggcagtggcgactgcacgcaggctgccctcatccagcgcggcctggcggatctgcccattgccatcgcggtaggccgcaccggcaggcgtgcccaggcccagcaccgacacctgcaggcccaggctgcgtgcctgcgccgccgccagtgcagcttcgctgtccgcctgatcgctgaccagcaggatctgcccctgcaacgcgccgatctgccgcatcaagcgtgtcgcccagtcgatgccgcggtcggcacgctggccatcacgcggcatcacgtccggcgacagcgcatccagatacaacgcaacattgctgccgtcgtcggtcagcggcgccacggtgtaggcatcatcggcatacaccaccagccccacctgcccgccctggcgtgcgcgcagcagctcgcccactttcgcccgcgcctgcagcaggcgcgacggcggaagatcggttgccgtgatccggctggacaggtccagcaccaccagcagcggtgcgctggcctggaacatcggttgtgcctgctgccgccagctcggcccggccatggccagcgatgccagtgtccagcccagcagcagcgcccatggcaggcgcactcgccgcttcgcgcccgcggccagcaggtggggcaacaggtgtgcgtccaccgcctgccgccacgcatcactgcgtcgctgccggtacaccgcgagcgcgaggatcaggggcaacgccagcagcgcccacaaccactccggtcgcaggaagtgcaatacgctccaatcggggagattcgaagcaaacgcgatcatcggcgacgctccggccacagccaggccagcacgcccagcagcaacgccagccccaacggccacgcatagcgctcctcgcgcggacgcaggctcggccccttcgcggcgaccggctccaggcgatcgagctcggcgtagatcccggccagctgcgcggtgtcacgcgcgcggaagaactggccaccggtcatgctggcgatcttcttcagggtggcctcatcgaccggatcctggtcggtggaaatcgggataccaaacaggcgcatgctgccatcgccgccgaatgcaaccgtgtggatgcgcacgccttcggcgcgcgcgacttccgcggcgcgcagcggctccagcacaccggcgttgctgacaccatcggtcaacaggatcagcacgcgctgtccctccggctggctgcgcaggcgcttcaccgccaggccgatggcatcaccgatggcggtctcgcgcccggccaggccgaccacgctgtcgcgcagctgatcgcgcacgctggccaggtctgcggtaagcggcgtaagcgtgtaggcgcgatcaccgaaaatcagcaggccgacgcggtcgccggcacgacgatccaggaagtcggccagcacggccttggccgcggtgaggcgatcaaccgcctgggctcccagcaccatgtcaccctcgcccatgctgccggacacgtccatcgccagcatcatctgccggccctgctgcggcggcgtgatggcttcgcccagctgctgcggccgtgccagcgcgatgcacagcgcgcaccagcccagccatagcagcagcgtgcgcagccacgacacgtcgacgcggcccccaccggacagcgcttcgagctcggcggcggcgtagggcacacgcagcgcggcgcccggttctgcacggcgcttccaccagcgcatcagcaacggcaacggcagcgcgagcaatgccagtggccatgccagctgcaggtccggccatggccaataggtcgtccagaggttcatcggcggcgctccagcagcatcgccagatagcgctcgcgggcccaactgcgcacggccgccacgtcgctgctgtcgacgcgtgggcgatacgcgccttcggccagcaggctgcgacgcgcatcgggcaacgtgccctgcgggtctacacgctgccaccaggcatcatcgcgcagcgattcactgcccggctttgcacggcgtgcggcacggcgcagcaatccggcaatggccgccagttcggccgcagcgtcggtggtggctgccagttcgctatcgaacagctgcaaccaacgctggcggcgacggcgacgccgccacatcagcacggcgatcaccaacagcaccagcacaaccgccgcgccgaccatcaggtaaccgggggcaggcggccaccatgaaggtgccggtggcaactgcacatcgcgcagcggcagcgcggcgctcacgccggcacctcggtcggtgatggcgccagccacgcgtcgctgggcgcatccgtggacagcacctgcacatcgacacggcgtgcgccgagctggcgccgcagttcctgcagcggttcgacgaagtgtgcctgccaatgcgcctgcacttcactgcggcgcaggtcgaggccgatgcgctgctgtgcggtctggaactgcagcgccgccgaggggggatgcagttccagcggatcaaccagcagcaccaggctgagatcgtgatgctgggccagcgcgctccagcgcgcgggcggaatgcggatggcctgctgcggatcggccagcaccagcatgcgtgcccccgggcgcagcacgcgaccggcatgatccagtgcacgcgccaggcccagatcgtcgaccggcggctgtgcataccagcgggtcagcgcgtcgagcacgcgcagcacgccgcgtggcccgcccgcaggggcaatcggcgcttcgcggtcactgccgcgcagcgcacccacgcggtcgccgcggcgctgcgccgaccacgcggcaaccgcaccggcacgggcggcctgtaccgatttgaagcgcacgcgcgtgccgaagtacagcgccggcgacgtatcggccacgatcaggctgacccgctcgcgctcggcctggaacaatttggtatgggcgcggccggtgcgcgcagtcacgcgccaatcgatgtggcgcgcgtcatcgccagctacatattcgcgcgactcggcgtattccatgccgcggccgcgcagttgggacggtgcctggcccgcgttgccggtgcggccacggcgcggcggcggcggacgctgtgccagccgccgtagcgcgaccagttcggccagctgcgggcgcagcccgtcaccttcgagcgcggacggtgcctgttccagggatggataggtcatgcgcaggctcagggtgccggcacccgggccagcagctcctgcaccaggcgctcgccgtcccagccctcggcggtggcttcatagctgggcagcacgcgatggcgcagcacgtcggcggcgactgcacgcacgtcgtcgggcgtgacaaagtcacggccggccagccacgcccgcgcacgggcacagcgctccagtgcgatggaaccgcgcgggcttgccccccaggcgatgcggcggccgaggccggcgtcgtagcgcgcgggatcgcgcgaggccagcaccagttcgatcaggtagcgctccagtgccggtgccatgtgcaggtccagcacttcgcggcgggcgtcgaacacgtcctgcatcggcatcttgtccggcgccggcgcagcctcgcccaatgcaccacgggcacgctcacgggccagccgcaggatttccgattcggcggcctggtccgggtaaccgatgcgcacatgcatcaggaaacggtccagctgcgcttccggcagcgggaaggtgccctcctgctcgatcgggttctgcgtggccatcaccaggaacagcggcggcagcgcataggtatggcggccaaccgtgacctggcgctcgcccatggcctccagcagcgccgactgcactttggccggtgcccggttgatctcgtcggccagcaggatcgggtggaagatcgggccgggcacgaactcgaagcggccctcctgcgggcgccagatctcggtgccggtgaggtcggccggcagcaggtcgggggtgaactgcacgcgggcaaagtctgcttccaggcgcgaggccagtgcacggatcgccgtggtcttggccaggcccggcgcgccctccaccaacagatggccgtcggccaacaatgcaatcagcaggcgttcgaccagtgccgcctggccgacgatctcggccgacagcgcgtcgcgcagctgggtgaacgccgcatgcaggcgggaggtggccggcgcgggcggcggcgagacggtttcgggcatcggcggtggcaggttcatgggggcctttgaccggcgcaggacggcacgggttcccgacatcatcgcagggtgccctgcgattggcatcaagaaccgctgaacagccgtccacgctgggcatggatctgcttcgtgcatgccgccagcccaaacgaaaaagggccgcacggggcggcccttcttcgtttcgcgggaggcgcgggctcagttctgcttggccacgcgcagcaccttcggggtgacgaacacgagcagctcggccttgtccttgttgcgaccgcgcttcttgaacaggttgcccaggaacggcacgtcgcccaggaacggcaccttgctgatgctgttgcgatcggtgaactcgtagacgccaccgatcaccacggtctgcccatcctcgaccagcaccgcggtgttgacttcgcgtcggttgatcgacggcacggtgccgtagccctccagctggatcagctggtcgacttcgtccttcttcacctgcatgttgaggaacacgcggttgtcgttggtgatggtcggggtgaccttcagctccagcaccacttccttgaactggacgttcggggtcgccacgccgccagcggtaccaccgctgatggtgacgtagccgatttccttgccctgcttgatcatcgcttcgcgctggttggtggtgaccacgcgcgggttggagatcacctcgcctcgcgattcctgctgcatggcagacagctccacgtccagcaggtaaccggcattgaggatcgacagcgccagcgaacccgggttgctggcggcggccaccggcaggttccagttcaggccacgggtgatcgccgagccggacttcaccggcggcggaccgacccggccaccggcttcccagtcacgctcggccttggcattggccaggtcggtcgtgacctgcgactcacgggtcttcgcattggcatccaggctgccgctgaagtacacgttgtcacggctgccgctgacaccgaacttcgcacccagttcgcgggcgaaggtatcggtggcgatgacgatgcggctttcgatcagcacctggtcgaccgggcggtcgatcacgttgatcagctcgcgcatgcgcgcgatcttcttcgggatgtcgctgatcatcagcgtgttggtgcgctcgtcggccacgatgcggccgcgcgaggacaggaagccactgtcttcctgcgaggagctgcccgaaccaccaccactgccaccaccaccgctgccgccgatgcccttggcctcggtcagcgccttgaagatctgcgtggcgctgtggtagttgatctggatgtagtcggtctgcaggtcttcgcggttctcgatggcgatgcgcgcgtcttccttttcctgctcgaacttggccagttcggcctgcggcgccacccagatcacgctgccgtcgcgacgcttgtccaggcccttggcgcgcaggacgatgtccagcgcctggtcccacggcacattgaccaggcgcagggtcacgttgccctgcaccgagtcggacgccaccacgttcaggttggactcctcggcgatcaactgcagcacggtgcgcaccggcacgtcctggaagttgaaggtcaccggcttgccggtgaagccgcgctggccgacggccttggccgcctgggtgacgctgccggcggtgaccgcacccacggcggcctgggcctggcgcgggctgatctcgaccacgtattcgttgccgctctggtaggctagcgactccaccgcgccaccggtgctcagcaccagttgggtgccggcgcccgacggcttggcgtcgatgcgctgtaccggcgtggcgaagtcggtgacgttcatcggcttctgcaggttggccggcagccgggcattgccgacgtcgaccaccacgctgttgccctgcgtgcgcaggtcagggatcgcgccctgcccgtcgaactgcacgatcaggcgcccggcgccgtcatcgccacgcttgaaatcgatcttggccaccgacaggcccgccggcgcggcggccggtgccacggtggcgcccaccggcttttccgccggtgcggcagccagcgccggagcgcaggccagcatcagcgcgactcccagcgcgctgacacggttcaaggtagagcgccggatgggacgcagccccttggcttggtgaaaggtcatcgtgctatccccagtaaacgatcattgatcttcaagcgagagcgttgccggccgttccagccagccacccgcgccatccggcaccagttcgatcagctccacgcggtcttcgaagaccgccgtgacccgcccgtcgctctgccccaggtaaccgcccgggcgaacccggtaggtgaccttgtccggccccatcaccagcgccacggtacctgcgccggtaccgatggtgccgaccatgtccagcgcatccagcgggaagccttccaacggctccttgcgccggttcgggtccggtcgcaatccgccgttcccctgctgcggattggtccaggcatcggtgaacggatcgcgcatgccctgcgcggagtattcaaaggtctcgaactgctgcatcaccggcagcggctccagcggttgcgccggtcgcgcgcgctcgccttccacccacttctcaaggttcggtgcgtcgccgggcgtgctggtcacgccacggccgcaaccagccagcagcagcacagccagcaccatcgcaccacgtacggtctgcgcgcgcatcacttcttgccctccttgccagcgtcggacgcctgctgcgcctgcacctcggtctcgtccaggtagcggtaggtcttgaccgtaccggacagttccagtgcaccgctgcggacgttgccgccggtcttttccttgggcttgaggttgatgtcatgcatggtcaggatcaccacccgcggcagcgaggccacgccactgacgaacgcgccgaactggtggtaactgcccaccatgcgcagcttgatcggcttctcggcgtagaactccttgatctgctcctgctccggctcgaacagctcgttggtcaggccgctggacagcgcggtctgcgagatgtcgatgatcaggtcgggcatttcggtcttgctcggcagctgccgcagcatctgctgcagcacctgctccatctgcgccagctgctgcttcagcggccccaggttcaccgcgcgttcctgctgcttggtgaactcggtgcgcagctcgacttccttcgattccaggccggccagttcttcgcgcttgccgctgatcagcagcatccacgccacgaacatgatgaccagcgccagcaacgagcagaagacgatcttggccttctgcggccagttgccgatgtcgttgaaatccaggttcttgatgtcgatcttctggctcatgcgcggtccccctgcagcagcgcattgaaggcctgcggcggctgcgccaggcggctgccctcaggcttcggggcaggtgccggggccggcgcggcggccggagcggccggttggttcggcttggccggcgtggccggtgcagtggccggtgcggcgggagctgctgccggctggcccgctgccggggccgcaggcgtcgcggcatccggacctgcggccaacggtgccaccggtgccggcgcagccgtcgccaccgagccatcggcgttcaggcccggcgtcgccgacacctcttcgctctgtgccggcagtttcaccttgaccacgaacacgtagggcagcgccttgatgtcggccagcgggccggccttgccgtccttgtccttctccgggtcacgcgcttcgatgatcgacagctccgggttggtcatccagccagaggtctccaggttgcgcatgtaggccgaaacgcgggcgttggactgggtgcggccttccagcgtcagtacatccccttcctgcttcagcgcggtcagcaccacgccgtcggggatggtgcgcaccagcgcgtcgaacaggtggaccatctgcgagcgcttggcctgcagctcctcgatcaccttcttgcgcgccagcaggcgttccttctgcgcgtcgaggcggtcgatctccttgttctgttccttgaccttctcgatctcggcttccagataagcattgcggtccatctggccgctcacctgacggtcgtagtagaaccagatcatcagcgacagcagcaggccaccgacggcggccatgcccagcattgcgtagaactcgcgctggcgttgcttgcgccgctcggcgcgccagggcaatagattgatgcgtgccatcagtcaaagctcctcagcgccagaccggtcgcgatcatcagcgcgggggcatcctgggccaacgcatgcgcgttcaccttcggccccagggtcatctgcgccagcgggttggcgaccacggtcggcacgcccagctgttcctcgaccatctccggcaggccaccgagcacggcgcagccgccggccagcacgatgtgatcgacgcggttgaattcgctgcctgcgtagaagaactgcagcaggcggctgatctgctggaccgtggcttccttgaacggctccagcacttccatctcgtagctttccggcaggccgccctggcgcttggccagcccggcttcctcgtagctcagcccgtagcggcgcatgatctcgtcggtcagctgcttgccaccgaacacctgctcgcggctgtagaggctgcggccgccgcgcaggacattgagggtggtcatggtggcgccgatatcgaccagcgcgaccacgccgtcgatggataccggcagctcgctggcgaccagggcgtaggcgttctcgaccgcgaaggcctccacgtccatcaccttggcctgcaggccaccgagttccagcgcggactggcgcagctcgacattctccgaacgcgacgcggccagcagcacctggaccatctccgggttgttcgggatcgacccgatcacctcgaagtccaggttcacttcctcgatcggatagggaatgtagttgaccgcttccagctcgatctgggcttccatgtcgttttcgtcgagatcggccggcatcgggatcaccttggtgatcactgccgaccccgcgacggcggcagcggccaatttggccttgctgcctgaacggttcatcgcccgacggatggcctcacccacggcctccacttcaacgatgttcttctccaccaccgcattgggcggcagaggttccacagcgtaatgttccacgcggaaacgattgccgctgcgggacagctgcaaaagctttaccgcagtcgaactgatgtcgacgcctacgagcggcgactgactttttgggatgagccccacggtttctcccctgccgacgggcacttggacgcaagacctgcgcccaagcattaataacgtattcttagcaaatggcaacggccctgctgtgaattccttcacggattcaccatgcagcccctgactgttccccttgcgctccccggtgccgaccccagccggcaccttgcgtaatctatactctgcgaccacgaaattcgcaatcggaatctgaacccgatgactcgactccgccgctggctgcgctggatcttcttgattgtcctggtcctggcgctgatcggcgcggccgccgtgggcggtctgtactacgccgtttcctccaagcttcccgacgtgcagaccctgcgcgacgtggaaatgcaggagccgatgtacgtctatgctgccgatggcaagctgatggcggtgttcggcgagacccggcggaccccgatcaccatgaaggacgtgccggagaagctgaagcaggccttcctggcgaccgaggacgcccgcttctacgagcacggcggcgtggactacatgggcatcggccgggcggtctggctgctggccaccaccagcgacaagcgcgtgccgggtggctccaccatcacccagcaggtggcccgccagttcttcctcagctccgagtacagctacacccgcaagctggccgagatcctgctggcgcgcaagatcgagtccgagctgagcaaggacgaaatcttcgagctgtacctgaacaagagtttcttcggcaaccgcgcctacggcgtggccgctgccgccgagttctattacggcaagaaactgaacgagctggacctggatgagatggcctcgctggccggcatccccaagttcccctcgtcgggcaacccgatctccaacccggagcgtgcccgccagcgccgcgacaactacgtgctgcagcgcatggccgacctgaaattcgtcagccaggccgaggccgacgcggccaaggccgtgccgatgcacgccaccgcgcatgagccgccggtgcaggtcgatgctccgtacgtggccgagctggtgcgccaggagatgatcgcccgcttcggcggcgacgtggtcaacaagggctatcacgtcaccactaccatcgactccaccctgcagaccgccgcgaaccagtcggtgcgcgacggcctgctgctgtacgaccaccgccacggctggcacggcgtggagaagcaggtgcaggtgggtgccggcgaagacgccgccgccctggccgagcacctgcgcggcatgtacggccaagccggcctgctgccggcgatcgtcgccagcaccggcgccgacggcagcgccaccgtggtgctggccaaccgcagcgagatcgtgctgccggccggcgccgccaagtggaccaacaagaccccgggcaagctggtgcagcgcggtgacatcgtgcgcgtgcgcgccggggccaaggagggcgagtggctgctggaccagatcccgcgcggccagtccgcgctggtctcgctggatgcccacagcggcgcgctgaaggcgctggtgggtggcttcagcttctccggcaacaagttcaaccgcgccacccaggcccgccgccagccgggttcgagcttcaagccattcgtctacgcagccgccttcgacaagggctacaacccggcctcgatcgtgctcgacgccccggtcgtgttccgcgaccgccgcggcaagacctgggccccgcagaacgacggcggcggcttccgcggcccgatgcgtctgcgcgaagcgctggtgcagtcacgcaacctggtgtcggtgcgcctgctcgatggcatgggcgtggactacgcacgcaagtacatcagcgagtttggctttgccgaatcggagctgccgccgaacctgtcgatgtcgctgggcaccgcctcgctgaccccgctgtcggtggcgcgcggctacgccgtgttcgccaacggcggctcgcgcgtggacacctggctgatcgaccaggtcaatgaccgcgacggcaacctggtgttcaaggaaaacccggcgctggcctgccgcgactgcgccggcagcagcgaccagccggtcaaccaggtggtggacggcttcaacttcggcgctccggccccgaaggtggacccggccgccgcagccaaggccgaagccaaggtcgaaaccccggcggcaccggccaacccggatgcccgcactgccccgcgcgcgatcgacgcccgcaccgcctaccagctggtatcgatgatgcgcgacgtggtccagcgcggcaccggcgtgcaggccaaggtgctcggccgcgaagacgtgggcggcaagaccggctccaccaacgaccaccgcgatgcctggttctccggcttcggcggcccgtacgtgaccaccgtgtgggtgggccgcgacgacttccgctcgctgggctaccgcgagtacggtggcaaggcggcgctgccgatctggatcgactacatgcgcaccgcgctgaaggacaccccgatcgcgcagaacgacccgcccagcggcatggtccaggccaccctcaacggcgcgaccgagtgggtgaaggtggaagacatggaccgcctgaccgactacgacctgaacctcaatacgccgcaggccgacgccgccgcgttcgatatcttctgaggaagggtccggtgggtgccaacggtgagttggcaccgatgcagctgtagagccgagcccatgctcggctccgggcgcctgcgatagagcagccgagcatgggctcggctctacaggatcaacggcacccgcttgctggcctccatgaaatacccacgcggatgtcacatccgtgcgctagtctgtagccaggtcgcaacaggagtcatcgcatgcatcgcgcccgtcagcatgctgccagccagacccgcgagcggcgccatcgcctcgcccacgaagccgcccgcctgatggccgaaggcggcatccgcgactatcaccaggccaagttgaaggccgccagccggctcggcatccacgacgatgcttccctgccccgcaacaccgagatcgaagacgccctgcgcgagtaccagcggctgttctccggcccccagcacggcaacgaactgcagcgccgccgcgaagccgcgttgcgtgcgctggagttcctgcacggcttcgcaccgcgcctggccggcccggtgctggagggcaccgccgatgccaacagccccgtacagctgcacctgcacagtgacgacccggaagccgtgcaccgcttcctggacgagcacggcattcccgccgagtcgcggacgcgccgactgcggatggaccgcgaacggagcctggacgtgccggtgtgggtgttcagcgccgaggagctgaccttcgacctggccgtgctgccgtatgacgccctgcgccaggcgcccttgtcgccggtggacgagaagccgatgcgacgcgcgtctgtcgcacagttgcggcagctgctggccgaggcggagatcaccgcgtacatcggcgggtgacggtagctccggccttgggtggttccggccttgggtggttccggccttggtgggtgcggaccgttggtccgcactgcgcttcagacattcggacacctgaccgaagagcagccgagcatggctcggctctacagaaggcgcgctgcctgcttccttcttctggtgggtgcggaccgttggtccgcactgtgcatcaggcatccggacacctggcccaagagcagccgagcatggctcggctctacagaaggcgcgttgcctgcttccttcttctggtaggtgcggaccgttggtccgcacgatgcatcaggcatccggacacctgccccaagagcagccgagcatggctcggctctacagaaggcgcgttgcctgcttccttcttctggtaggtgcggaccgttggtccgcacggtgcttcaggcatccggacacctggcccaagagcagccgagcatggctcggctctacagaaggcgcgctgcctgcttccttcttctggtgggtgcggaccgttggtccgcacgatgcatcaggcatccggacacctggcccaagagcagccgagcatggctcggccctacagaaggcgcgctgacctaccagacatcatggtgctgctcctccggctcatcgccaagcaggcgcatcagccacggtgctcccacccgctgcgggtacgccatcatcatccgcgcgtgcatgttctgcagatcgcccagcaaccaagtctggttgtagacatcgccgaacgggtccgaccacgccgtctgtatccgcgcgcgctcaccgccgttgaggttgggcatcctgtccaacggcacctccagcaccggctccagcccccggttgatggccgcgttctccgcctccgccgcacgcatgagctccagccggtggctcacctgccagcatgggaaggggaagcagctgcccgtggcttcgatgtacgccgccatgtcggccagcatgtgggctttcagctgccacaccctctcactgtccagcagttgtcgcacccgcagtgtgcgcagcgttcccgcgcggacgtcttccggcgtggtgaacggctcgcccggtgtcgggccaccatgccgcaccagcacgatgcggtggatcgcttcctgggtgatgttctccacgcgcagcgcggcggcctccggatgcacgcgcggtggcggcacgctcgccacccgccagtggtaccagagcaccagcaccatgcccaccaggcacaacaaggtgaactgcacccagcgatccagattgcgggtgtagtagtaaaaacgcgcccgccacagatagaacgtgcggtagctgatgaatcggcttacccatcgatacattgccatctcctcggcaaggaccccggcgcggcggggttcattacgcgcaccacgccggggctgcacggcttaccagccgatgcccacgccgacgcccatgctgcgctcaccgctgttggtgaacgcaccattgaggctgaaggtggccgaacccttctcgttcagcacgcgctggtagcccaccgccatcgccgactcaccctcgctgtaacccacgcccgcacccaggcggttgtaggtggccaggccggcggtattcatcgccatcgcactctgtgcgctgctcattgccgccatgcggttgaagcgcttgtccatcttgtccaggcggcgttcgaaggtgctgatcgcaccatcggtgtactcgttggcacgagccagcatcttctccagctcggcggtatcgacctgcggcttgggcgtgtcgtcctgcttctgcttcggctgcggcgtcggcttgtcactttcaccggttgaggcgatctgcggcgagccgctggtttccggtgtcggcgcgatctcttcggtggacggcgaaggtgtggatgccgccgccatgacgcggacctgcggctgatcgtcgatgcgctgctccagcccatccatgcggccgttgatctgctgctgcatcgaatgcagctggccaccattgaccgcatcgcggctgccggccgcgatcaggccgttggctacgttggagatgaccatgccgttggcaccggccagggtgagctggtgggtaccgtctgcgcgcaccgaaggggtttcctggaacaccgagcggagctgggattcgacctggttcacccgcgaggtggtgctgacgactgcgccgtcgagcgcttccaatgcaccattgagcgtggattgggactgaccctgcacattgaaactgggaccgacgatgttgccgctggcatcgacttcgccgccgagggcggacagtgcgccgcgcagctggccgacggtggcagcgttgtggttggcggtgccgttggcgatgtttacgagacggcgcgtcatctcaccattaccgaacgatgcaactcctacctcggtcgcatacgagccgaacccaagcgccatcgaaccgtcggcaccattccgaaccctcgcaccgatgccgagagcgatcccaccaactgcggttccaccatcatacgttccgacttccgcgcccgtcccaatggcaatgctgaaatcggaaccattgaagacggtcgatccccgcccaagtgccaccgagttcacccccaacgcaagagagcgtgacccaatcgcagttcctccttcggtgcccgcctttgcaaggatgccaagcgcgaccccggctcggccggcctccgcgcggccagtcgtgggacctgtacccacactgagaaactgaccagcatcttccagtgcatcgagtcgaccattggtctcatagagctgacttccgcgcacaacatccgagctatcagtcgacagcttcgcctcggccacgccagtcaaacgcgcaccgccgtagtcgatgacgctcgcatccaatccacgcatggcctgctcgcccatctcccgctccttgcgcatcgcctccagatcgttccgattctgcgagatcttctgctctgcggcgtacaactgactgccggttacagcatcgcggcttcctggcgccactcggccgtcagtcaggttggtcagcaccatgccattcacgccgttcagcgcgatctggttcatgccgtcggcgcgggtcgaaggtgagtcctggaagatcaagctgagctggccttccaccttgtccgcgcgacgacctgcggtgacgacagcgccatcgagtgccatcagcgcgtcctcaacggtgctctgagttccaccctgtaccgtgtaggtcggggcgatgatgttgccgttggcatccatgcctgcaccaccaccgagagtggcgagggaatccttgagctgagagacagtggtgacgttgtggtcgtcggtgccccgagcaacgttggtgagccggcgcttaacctcgtcactgccaaacgaggcggtatgggcctcatcggctacagatgaggctccgagagccaatgcactagtggcacccttctgaacaatgctattcgccccgatcgagacaccaccagcctcctgcaccgaagcgagaacgccaagagcgaacccattgtcagctagctcatccacgcgagcagccctgcccaaagcaacagaattcttgccacgagcagaagagaagccacctacggcgacagcaccctcacttgaaactgatgcctcggcggaatcaccaatagcaacggcgatcaagcctgctcgcgccgcaccttcaggcccacccttcccgctcgaaaaatagcgcgaactctcagcaatttcctcaattcgtctaacagcttcatctgcggtgttcctcgctccttgcgcagactgctcaaccgcatgcagctgcccgccattgactgcatcggcactaccaacgtccagcagaccatccgccacaccagtgatcttccggttggcattggcgctgttacgcacattcagggtcgtaccgctgtttttctctccgaaacgaacatcgccagaggcggagacctgcgccaccaacccgcccagaaccgctgtttcggccagcgccttggccgcatccgcttttgccagggtcgcgtccgcagccgcagaggtggccatgccttccacagccaccaccttctcattggtggcattgagctgcctgccgttgacggcttcgtagctgctggcgctgaccacgccatcggccacgccggtcagcttacggttcgcattcgcgctgttgcgcacatccagtacggtgccgctgttcttttcacccaggcggacagcctccgtggccgaaacctgcccgatcagcccacccaatacagtgacttcagccaaggccttggtggcatcaacctgtgcggcgttggcagtggcttgcgctccattcgcggcattctgtgcagtcgttacccggccgttggtttcattcaactgcttgcccgtaatggcctcggtactgctgctgctgacagcgccatccgccaggttgacgatcttgcgcttgatactggagctgccgatcgagacctggttgatgccgttggtctgcgagccgttgcccagagcgacacttcccgtatgtgatgccagtgcgcggtcgcccaacgcaatggcactttcggcccctgcctttgcaagattgccaagcgccgtcgaatacaagcccgatgcggcggcctcccggccaatggcgacggcctgattgccgctcgcatctgccttgtagcccagcgcggcggcatgggtcgccgcggccgtcgcatcattgcccacggccacggcgcgatcacccactgccgaagcacgcaggcctgccgccaccgcgccattgccaccgcgcgttgcagcaccgagagcaactgcaccggtggcagcgctcttgtcgccgttggcgtcgacaccggcccgagcatctgcaccaactgcgatgctgttggtgttgtaggccttcgccgagcgccccatcgctacgctggcggtgcttccgctcccttccgcctctgccgccagcccgatagccggggcggatgcgttcaggcgcgcggctgccgcgtctgcgacgcgctgtgcatctgccagcttggtgttggtggcattcaactgcttgcctgacacagcatcggtgctggacgtactcagcgtggcatccgccacgcccgtgatcctgcgattggcgctggcgctgttgcggacgtccagcacagttccgctgttacttgcacctaggcgaacgttccccgaggcagacgtctggctcaggaggccggaaagcacattggctttcgacaaggcattgtccgcattggacttcgccgtatcggcaacagtcctggccgtcctggcggtcgagtaagccgaatccgcagtgcttcgcgccgaggctacattctgattggtttcatacagctgaccaccggtgaccgcgtccgaactgccgtaggaaatgttacctgatgcgacattcacgatcctacgtttaatgctgctacttcccaccgagactgtgttgcttccgttggctaccgaattggcaccaatggccaccgcattcgatgcggtggccgaggcgccgcttccaatggcgacagcattctcagcgcgagccgttgagctgtttcccaaagcggttgcgccaatgtaatcggcaaaggccttggccccaatggcgacattgtggcctccattgctgccggtacgcgacgtgtaaccgatcgccacgctgtcaacgtcggaggaagtagagtggtatccaaaagcgacactgttccgcttctcgatccgtgcgccttgaccgaaggcgaatgagtagcttccgtagatcctggaccccgcaccgatcgccatcgagttcgtcacatccaaactcatgtcggcatagcctgtcgacatgcgcggatcccacacacccatgaatggaatgcagtgccggatgttcccgttgtcacccgaacaaccgacatcgaggcccgcattcgcgctgccggccgcaccggccagtgcgatgaagacaatcagtgcggtcccgcgacgatgaatcaaggtgcttcgtggctttccacgcgctgctaccagctcgcccacgaccacccaacactgctttgcattgctccagatacgacgatagatatgattcatgctctcttccttaacaggacatcgaaaatgaggccccgcgaacagcgcggggccaggaacgatcaggcgcttggcgccagggtggttacgtgctcgcggtagccgtccttggacaggcggtaatgcagctgcacggtgttgcccggctgaggctggaacggcagcttcagctccgcatccgggtacaggcttttggcaaagtcgtgggtcgtgcaggcaccactgccggtgcactcggccagccctgtgatgcccacccgcaaggtccccacgttgcgcagggtgtcgccctgcagttgcagatccacgctgccattggcgggcagcacgttcaccagcgcaccccagaccaggctgacgccgacgttggcctgtgccgcctgctcgtcaccctcgagcagggtcccgtccggtcccctgacaccctcgaagtagacgcggtaggccacttccttctccacgctgcgtagcggaatcacccggatcaggcgattgcctccgccactgagtgcgaacttcccaggggtgatggcgaccgcggcatcggccgcctccatgtccacctcttcctcgccagcctgggcgggattcgagatgcgcaacaggcgtgcctgcacgtactgcggctgggtggagtgcgagtagacgcggatctgcgtaccgcgcttgccatcgacggccgcgcgcattggatggatggagaggttggcatgtaccggcggcgccagcagcgcgctcaacggcagcagacagaacaacagcttcttcatgatgaggctccgtgggatcagggtttggcggtcggcacgcgcagctctaccgtcagctcgccgtcgtagagaccgggccgcttgctggcgatgggcgtaggcggcgtttccagcaccagcggcgtgggcacgcagtacacgggttgattgatgcccggcagcatcaccaggcgcagctgcgcgctgtcgataccgcgcagcagctgttcctcgccgtgtttcatggccagcaggtttccgccgtacttcaggccgacctggtagtccaggcgctgggtgtcatcgctgccgccgtccccgtgccagactgcgaagtcccgtccgggcgggggccgtggaccgctgtcgcgcacggtgacgccgaggaactcgctctgcgagcccacgccgtcgtacaggcacatgtccacttccttgtagccgccgaccatcttgcggatggggtcgtagcgcaggtccatgttgaccagcggtgcgatgccgtcgaagcccgggaagtagatcgagatcgcgtcgtagtcggtgacggtgaagtcgaagttgacgatgtacttagtacttagccagatgccttcccggtggcattctcagattgagttcgagactgcccctccagcgaccggcaaccaagcgggcaatgctgtccccagcgatcgcaatggtcagcccggtaccgactgcatagtcactgccgcaaggtcttgaatgcgatgaccagatcgcatacctggtatcccgaaagtaatcgagtgagcatatctgggtggaatcagccctatagattgaagcagcgaagttgatcgtgcttggacttcccgtgcgctcttctatcgcccgtaccggtatcacactggttacatcgccactttctgcctctgtatcttcggtacgacacattccagatgtggggtcactggctgactcgcacgtcaggtagagctttccgtactgcttactcagatctatgtcgtacgcgatcaaagtcttgggcgccagaatctcgatgtcaccgggcatcgccgagcgatcccatcccatgttgatgtcacggataatcacaccggccggcggatccgtatcaggtggacgttgcgcccacgcccgtggcatcaccagaaccggcgcacacaccagcatcaacacacacatccaacgccggctcatggcgtacctcctgcagcagcggtctggggcgtggcggcaatcaacgcgcgttcctgcagcaggcgggtcacgcgggcctgctggcggatctcgggcggcagctgggccacggccagcggctcgcagtgcacggcgccgaccagcagcaccacctggcggcgctcgcgcaccagcagcgggcaatgcagcaggcggtcgtcctgcagcaggtacagcgttgtttcgcgacgcgggaaatcggcaacgaagctgccgttggcactggtgccgggcaccggcgcgttgaggatgcgggcgccgcccagcggcgacccggcaaggtccttggcgttgccaatgaaggtgtaagtcacttcgatcggcaccggcatgcgcatcagcttgccgggggtgaggaacatcggccgtgcaccgcccacgccggttacgcggatcgcggcgacgctgtccagcgtgctggcgtcctgcacttcggcgcgctgcgactgataggcctgcagcggcagcagccggcgctcgccgatctgcagacgctgtcggcgcagtccccccacctgcaattccgcggccacgccatgcaggtcggcatcgtcgaaaccgtccacctgcacggccaggccggcctcggcgccgttggcaccgctccagtagaaaccacgacggcccagtgcgaagccggagctgtggctgccgctgtagccggtctcgccacgcccgcgctgctgatagtgcgcgatgctggcggcggtgttgccgatgccgttctgcagctggccgctcagcgaggcgctgtaacggtcagtgttgttgccgcgcagttcggcgttcagctcccgatagtgcgtgtcccggtcctggcgcaggctctggcccacgctgtagtcgatggccgggcgctgatgctgcggctggcgcacgtccaccgcgtagcggcgctggccgctgctgtcatggttacgctgcaggcgggtcaggctgaggttgaagtagatgccacggtcacgctcgttgctgccgcgcacgctgtcggtgctgcgctgctgccatagccccacgcgcgtggacacgctgaagtcctgccagcggtggctgcggctgaagctggcctgccaggtccggctgagcacgggctcgcggcgcggctccagcggaccgggcggcagcaagggatccagcccgaacaacgggtcctgctcgaacccgggccgatgccagccggtgcgccaggtctggcgccgggtgtagcccacgtagacgttgccgccggccagcggcagcgataccgagccgctgagtgagttggtgcagcccagctggtcgcgcgcatcggcctcgaactggcaggccttgccgcgcatgcgctgctggtagagattccacgatgccttgcgccggtatgacagctggtgctgctgaccattgctaccatcgcttccacgcatgccgctgagcgaggcgcgcatttcctgggtggccagcacgcggcgcaggtccaggcgcagctcgccgtagctgtggccgccgaggttggcggcacccgcggtaagtgcggcatcgcggcccagcggcacgcgcacgccggccatcgccacactttcaccatcaaagcgatcactgcggcgctcgttgcggcggccgccctgcacgaaccactgccactggctgttggtccagtcgccgcccttgtcgaacggtgcctcctcggtgcgcaccagtacaccatcttcgtagatgcgcatgcgcaccaggtagttgccgaaggggaaattgcgggtgtcgatctggttgatgccggcctgcaggtagaaggtctgcagcagccgctcgccgtcgaacacgtcgacgcgtgcatcgcgcgccagcagcacggtcagcggcgtggcctgcacggcggcatcggtgtccacataggcctgggtggtacccacgcgcgcgccctggaaacggtccagcggcagcatgctgaaactgaaggtgccgccctgcgggctggacaggttgcggcggtccatacgcccggcctgcaggtagtgcgcctggcccaggtcatggcggtaatagacgttgtcgaactggaagtcgtcgtcgcttcggctgcggtagcgttgctgggtgtagtaccagtcggcggacaggtgagcgcgatcaaacagtcccagcgtgcctacgccgcgcgcggacagcgcctgatggtcgcggccgccgctgacgttgagcgtctgctggtgcaggaaggcgttttcggcgttggccgtgactgtgtggtagcgctcggcggccggctcgccgggaatccactgccgcgccacgaacaggcgcaccgcaccctcgccttcgtcatacagcgcgcgcgcgacggcgggatcgtccggtgggtcaagatagccgcaaccggccgtggcgccgccaaagcggcacgccaggtggctgttgcgcggcagcggctgcgacaacgccggcagcagcgccgcctgcgcttcggcaggcagggccagcgcctgcagcacgcgcgcggggtcttccagctgcacgtgctccagggtcacgcgcaccggcgacagcccggccgagcggccgaacagctagatgtcgagttgttcggtctggccttcgaccagatcctcgaagccggcggggacgccgtgggctgcgaccagaggagcagccagtgccagggcgagcgcgaccgccagccgggtaacggcgggggcgtgtggggtcattgggggtaccgctggagtagcggccggcccggggtgcgggccggcgcgggaagccgtggatcagggcttctggttcatgacgatgtagaccatgccttcgtagcggccgttgaccgtaagcgggccgcctgcacccgcctgggcgatggtcaggggcatcgagatggaggcacccggcgtcgagctggcgccgttgaacaggtcagccgccttgaactcggtgaccgcagtggtcagcgcgtcggtattcaggctgacggccagcggcacgcgcgtggcgccattgagcagcaccggatcgtggccgaggcgaacttcgatgtccttatcgatatcgttggagtggatgcgcacctgctgcgtcgacggcagcaggccgcgcagcggatcgtgggtcatctgcacggtatccggcagcggggtgccgtcctcgagcagcaacgccagggtcgggtcgacgtcggcgtagacggtgatcttggtttccagcgcgtgcgcggacagcgaagcagtggccagcgctgcagcgagcgcggccttcttgataatggcgtgcatggttgtctctctcggacaagggggaatttgaaagctcccctccccaaggagaaaagggagggaagcgccgcccgcggggatgggtgcgggcgacggagagaatgttagaaatccattgccatgcaggccattcaagcattcctaaaacgttgaacgttaaggagaatttttgaaggcgctctatgtttgagggttatgcaatttccctcactgtttgaatgcaataaacctcattgcattgcgtttgtagagtcgggcatggctcgactctactgtggggcatccacgcgtggcgtggatctgcgggatggcatcaggccgcctttcggcggcctgatgacacggcgcggtggtgcgcgatcagaagaagatcgcgtacaggatcagcagcggaatcggcacgcccagcaaccagagcagaatcatcttcatggcaggtctccttgcatggaagggtggattacaggtcgcggcggcggccgccccaggtggcgctgaggctggcgaagaacgcgccgatcagcagggtgatgaagagccacaatgcggcgtaggcggtcgccttccgcgcatcgtcggcagcctgcttggcggtattcctggccttctccagcgctgcacgcatgcgcgtctgcacatcggtcacgcgggcctgcgcttcagccgggctcatcccggtatcgcgcgcgatcagctgtgacagatactgggtatcggccggatccaggccttccccctgcaggctgttgacgatgatgcggttcacttcggcacgcacttcgcggcgatcgccgatcggaccgttgcccggcgccggtcgcggcggtggggccatgcgcgcgtcgcgcggaccggcgcccgctgccggcggtggcgcggcatccgggtccatcggtgcgcccggcggcggcgctgcgggatcggcctgccctgcgtgggtcgtgctgcggaacagcgcatccacccaatagtcgaggtcgccttccggtgcagccgccacagcgccgctggcaccggctgcagccacgccgacggtggacgcagcggcaccggcagtggcgccggccacctttgcgcccgcacccagcacgccaccgatggccgacgtcagcaggcccgcggtcagcagcgtggccaccgcccacgacacgaagccgtgcgcggtgtcgcggaagtacgtttcgtcgccgtggatctgcgtccacttggtacgcaggcgacccgccagatagccacccaggccggaagcggccagcgcggtgaaggtgagccaggcgatgctggaccagccgaaggtttccttgctgacgccttcgaacgaccagggcgacaccgacgacaaccccaggcccacgccgaggatcagcaggatgagagagagcgcagcggcggcggcggcgccagcgaagatggctccccacgacaccgcgctttcgctggcgggaggaacgatgggggcagtgacgacagcggcgacgtcagcgccgagcgggccgcgctcgggtgggtcgaatcgggtactcatcgggatggacgctccatttcaggtgctgcggatgcagctggcgtcctgaggctgcgcgagcgcttgtgaagctggtgagacccctgaatcacgcggtcttgtcgcgttgaagagcgtgccaaccaaggttggcacctaccaaaggcgggaacgcggtaactccatgccacgcgtggatgggggagcgtgccaaccaagggcgggaacaagtggatccacgccatgcgtggatggtttttcgcgagtgtcgaaagcgtgccaaccttggttggcacccaccagggcggcggaaaaaaaacgccccgcgcatgcggggcgttctcggcacaacctacgcggggcgatcagccctggtagtcgcgcacatcgctgccggtgtagacctggcgcggacggccgatcttcatttccggatcgacctgctgttccagccaatgcgagacccagccggaggtacggcccagggcgaacatgacggtgaacatttcggtcgggatctgcagcgccttgtagatgatgccgctgtagaaatcgacgttcgggtacagcttgcgcgcgacgaagtactcgtcctgcagcgcggcctgttccagcttcacggccacgtccagcagcggatcctgcacgcccagctgcttgagcaccttgctggtcatctcgccgatgaccttggcgcgcgggtcgaagttcttgtagacgcggtggccgaagcccatcaggcggaagccggaggtcttgtccttggccttgaccacggcggactcgacgttgtcggcgctgccgatctcttccagcatcttcagcacggcttcgttggcaccgccgtgggccggaccccacagcgcggtgacgccagcggcgaccgacgcgtacgggttggcaccggtcgaaccgaccaggcgcacggtcgaggtcgaggcgttctgctcgtggtcggcgtgcaggatgaacagcaggtccagcgccttgaccacatccgggttcagatcgtactggccgtcagccgactcgaaggtttgcttcaggaagcggctgacgtagtccagcgacgtgtccggcttgttggccggcaggcccttgccatggcggtagatcagcgccgacagggtcggcaccttggcgatcaggcgcacggcggcctggcggcgctgttcggcgtcggacaggtccagcgcatcgtggtagatggccgacagctgcgcgatcgcagcagccagaatggccatcgggtgggcgtccttggcgaagctgccgatcagggtgttgatcgagtcgtcgacattggcttcggcagtcagctcatcggtgaaggccttcagctgctcggcgctcgggcgctcgccgttgatcagcaggtaggccacttcgacgtagctcgacttttccgacagctgctcgatcgggtagccgcgatacagcagcacgcccttgtcgccgtcgatgtaagtgatggcggacttgcagctggccgtcgcggtgaagccggaatcgtaggtgaaaaaccccgtttccttggtcagcttcgcgatgtcgacgcagtcgttgccaagggtgggtttgatgacgggcagaacgacggacttatcgccggcgttgagcgtgacctgatcaagatcggacactgtgtgcgctccttcatgggaaggcgcctgcccaagcgcattggtcaggcacgtgaatgacgtcctcggcctgtgccggggatcatgccattatcgcacagcagcatttgcccggcgctagacagaagtcgtagacggcaggcggccagaacccggccagcaagcggcccggatcggcaaaagcgttgtcacacgaacgcagtgttctgtccatccaaacgcccgttgggtaggcgttggggaaaaacaaacggccgcgcagagcgcggccgtcggttcgaagctggatcgacagatcagcgcgcgtagcgcttctggaacttgtcgatacggcccgaggtgtcgatgaccttgtgcttgcccgtgtagaacgggtgcgaagccgaggaaatttcaaccttcaccagcgggtagtcgttgccgtcttcccacttgatggtttccttcgtcgccatggtcgagcgggtcaggatcttgaaatcggaggtgacgtcatggaagacgacgtcgcggtagttcggatggatatcggccttcatgggctcacaccgtaaatgggctggtggtcaagagcggcattataagcaccggttgccgcccggggcaaccggtgccggtcaatcggcttcagtccgcgcccagggcctggcgtaccagggtctcgaaacgctgctggtcgtaggccatcagcagatcgcagttgtccggctggccggtctggcggttccagtcgacgatggtggcgccgcggctgaacgtgccattcagctccacgttcagcggacgcgactcgacccgcagctgcccttccgggttcagtgcccaggccatggcaaccgcgtcggcggtgtaccagcggccgcccttgctgtcttcggacagcccacgggtcttgcgcgagatcagctcgtagaagcgggcacgatcggagtcggcctgcagccacttctcggcttcctccagcggcaggccatgggcgacggtggcctcccagtccgacaccagcaggtgcttgaacgaggtgaacaccacatgcgcggcttccgggtcgaaggcgatgttgaattcggctgccggggtgatgttgccgtggcaggtgaccgcgccgcccatcaccacgatgcgcttgatgcgctggggcagggtcgggtccagcttcagtgccagcgcgaggttggtcagcgggccaagcatcaccagcatcagttcgccggcatgcgcgtgcgacaggcgcaggatggccagcgcagcatgctcggcttcggcctggcggctcggcggcggcaggttcacgtcgccatagccatcacggccatgcacgtgggcagcgtctacggaaggatgcagcagcggatccgggctgccggcaaacaccggcacgtcggtgcggccgacgatgtcgcagagcttgagggcgttgcggacggtgtactgcaggccgacattgccggcggcgatggtcagggcgaccacgtcatgccgttcatcggcaaaggccatcagcagggccagggcgtcgtccacaccggggtcggtgtcgatcaacagggggatcttgtgggtcatcgttgccgtcttcagatcggcaacgaagtgtggaccgggatgatgaccgttgcaagtatggggggcggcagggctgcgacctgcacccgcggtagtgccggccgctggccgacaacttcaacagcaacgccgaaaacgggtttcccgcggatggcagggagagctctctgtagagtcgagccatgctcgactcccgcgcgcaacgcgcacagcaaccgagcgtgggctcggctctacagtggatccacgccgtgcgtggatgagcgtcccggggatggggtcagagccctttgctgtgcaaaggggcctgaccccgccacttacgccgaggcgtagcgcacggcggtgccgatccagcgctgcaccacgcgatcggccaacgcgggctgctgggccagcagtcgctcggccaggtcatgcacgccgggcagcaggccggcgtcgcgggccaggtctgcaatgcggaaaccggccaggccggtctggcgggtgcccagcagttcgccggggccgcgcagttccagatccttctcggcgatgacgaaaccatcgtgggtttcgcgcatggtctgcagacgctcgcgcgccatctgcgaaagcggagcctggtacagcagcacgcagcgcgataccgccgaaccacgccccacgcggccgcgcagctggtgcagctgggccaggccgaggcgttcggcgttctcgatcaccatcaacgaagcattgggtacgtccacgcccacttcgatgaccgtggtcgcgaccagcaggtcgatctcgccggtcttgaacgccaccatcgtcgccagcttttcggcggctttcaggcgtccgtgcaccagccccacgcgaacgccgggcagcagtgcctgcagcgattcgtaggtggcctgcgccggggtggcatccagttcttcgctttcctcgatgagcgtgcacacccagtacacctgccgcccttcctcgcaggccagcgcgatgcgctcgatcagttccgggcgacggtcattgttgagggcgacggtctgcaccggcgtgcgtcccggtggcagttcatcgatggccgacacatccaggtccgcgtactcggacatcgccagcgtgcgcggaatcggcgtggcggtcatcaccagctggtgcggcacgctgttgccgcccgcgcccttgtcgcgcagcgccaagcgctggtgcacgccgaagcggtgctgttcgtcgacgatggccaaggccagatcctggaacaccaccgcctcctgcatcagcgcgtgggtaccgaccaccacctgcgcttcgccactggcgacctgctccatcaccttggcgcgcgccttgccggtgaccttgccggccagccaggcgatacgcacaccgagcggctccagccagccgcgcaggttgttgagatgctgttcggccagcagttcggtgggcgctgccaatgcgacctgcttgccctgctccaccgccagcatcgccgccagtgcggccaccacggtcttgccggagccgacgtcgccctgcaccagccgcagcatcgggctggggcgcgcgaggtcttcacggatctgcttgaacacgcgcgcctgcgcgccggtgagcgcgaacggcagctgcttcagcagcgccttggccagcttgccaggaccagccagcggcggcgcatggtgtgcctgcaaggcaatgcgctggcgacgcaggctgaggtggtgggccagcagttcttccatcgccaggcggcgctgcgccgggtgggtgccggcggccagcgcggcgaggtcggcatccggcggtggccggtgcacggtcagcagcgcgctgcgcagcgacggcaggcccaggccatcgagccaaccgctgggcagcagttccagcgtgctctcctcgggcaggcgatccagggcctggccgatcagcttgcgcatcgtcatcgggcccacgccttcgacggtgggatacaccgggtcgaggcggtcgccgagttcgggatcatcgttgcggcccagcacctggtagctgggatggacgatttccaggccgaggtggccgggcttgggcgtgccgaagcagcgcagccggttgccgaccgcgaactggccgacctgctgctggcggaaatggaagaagcgcagcaccagggtgccctgcccttcgtcctccaccgcgaccttcagcatcggtcgatagcgcatgccgcgctcgaccgcgaccacccgcccttccacctgcgccggcacgccgttgcgcaggtcttcgatgcgggtcagccgggtccggtcttcatagcgcaggggcaggtgaagccagagatcctgcagggtggccaggccacgcgcctgcagtttggcggccacggccggaccgacgccggcgagcatcgccagggatgcttcgccggacggtgacaggaccggggtgaccgccgccttgcgtgccacgtggtggtcagtcgatgaccatcaccgcgtcgacctcgaagctggcgcccttcggcaggccggagacttcgatggtggaacgggccgggtacggggcctggaagtagtcctgcatgaccgcgttgaccttggcgaactcgcccaggtcggtcaggtacaggcccagacgcacgaccttgtccagcgagccgccggcggcttcggccacggccttgaggttgtcgaaggcgcgacgggcctgcgcttcgacgtcgccagcgccgacgatgtcgccggtggccgggtcaagcgggatctggccggagaagtacacggtgttgccggcgcgcacggcctgcgagtacgggccgatggcggcgggggccttttcggtgttgatgatctggcgggacatgggtcgctccggtgctttgggggaaaacagagcggtgattgtaccgggtgggcgcggcatcggctgggggtcggatccgtttcccggcgggaaacggatccgaccccgtatgtcgtgtgcgcggaacgtcatccacgcatggcgtggacctactggcggcgtaccgactgcacgaccgacaggcggcgcaggcggcgcatcacttcggccaggtggttgcggtcgcgcacctggatgttgaacgccagcacggcggcgttgaaatcgcgatccaggtagtccacgcgctcgatgttggagtggctctgcgcgatggcagcggccagctgtgccagcacgccggtgccgttctccacttccaccaccagcgaggtgtcgtagtcgccggagacggtggtgtcccagccgatcggcacccagcgctcgggcgacttgcgcagctcggccaggttcgggcagtccatgcggtgcaccacgatgcccttgccggcggtgtggtagcccatgatctcgtcgccgggaatcggctggcagcagccggcgaaggtgaccacgccacgctcgctgccgttgatcaggatcttttcctgcgagtggtggcgcgaatgcgggccgccacgcagttcggcgtaggccatcagcgcctgcgcggcctgggtcggcatccagttgcccagtgcgacctcggccagcagggcttccaggcgcgggaagcggtgttcggccaggaacgcatccaggcgccccttcggcagccgctccagcgacgaatccatcgcttccagcgcacggtcgagcatgcggtggcccagctgcacggcatcctcgtgctccagctgcttgagctggtggcggatggcggtgcgcgccttgctggtaaccacgaattccagccactgcggtttcggcgtggccgagcgtgcggtgatgatctccaccgactgccccgacaccagcttggtgcgcaacggcaccagtttcttgtccacgcgcgaggccaccgccatgttgccgacgtcggtatgcacggcgtaggcgaaatcgagcgcggtggaattgcgcggcagggccaggatcttgcccttcggggtgaacaggtagacctcgtccgggaacaggtcgaccttgacgttgtccaggaactccagtgaggaaccggcggcacgctgcgagtcgatcagctcgacgatccacgcgtgggcacggctctgtgcgctgttgggcgaatcgccgccgaacttgtaggtccagtgcgcggccacgccgcgttcggcgatcaggtccatttcctcggtacggatctgcacttcgatcggcgagccatacggcccgaacagcaccgtgtgcagcgactggtaaccgttggccttgggaatggcgatgaagtcgcggaaacggccatccagcggcttgaaggtggcatgcaccgaacccagcgcgtggtagcagctgggcacgctgcgcacgaccaggcggaagccgaacacatccatcacctggtcgaaggatttgttctcgtcgcgcatcttgttgtagatgctccacggggtcttgatgcggctgatcagccgatgctcgatcccctccttggccaggcgctgcgacagctgcacttccacctgcgccatcgcctcgcgacgcaccaccggctggctgcggatgtgcttctcgatgatggcgtggcgccacgggtacagcgccttgaaaccgaggttctgcagctcgctcttgaccaggctcatgcccaggcgctgggcgatgggcgcgtagatctccagcgtctcgcgggcgatgcggccgcgcgcttcgcggctctgcgcacccagcgtgcgcatgttgtgcaggcggtcggccagcttgatcatgatcacgcgcaggtcgcgcgacatcgccagcagcatcttgcggaagctctcggcggccgcctcctggcggtcgcggaacttcagcttgtccagcttggtgacgccgtcgaccagttcggccacggcttcgccgaactcggcggccagcgcctcgcgggtcagcggcgtgtcttcgatggtgtcgtgcaggatcgcggcgatcagcgcttccacgtccaggccgagctcggccagcacctgggccaccgccaccgggtgggtgatatagggctcacccgacttgcgcgtctgcccagcgtgcgcggaggctccgacttcccaggcacggcgcaacagcggcagctgttccggcggcaggtaatgggcggcgcgttcaagctggaggacgtagtcgggtacggcggcagtgggggctgcggcgaccttggcagtggggcctgggttcatgcccgcagcctattccagcgcgacgtttacggcaaatcctgaatgcgaaacagcccgcacggggcgggctgttcggtgtatccaacgattacgttgatcgatgcgatcaatcgtcgttcttggacatgtcttcgtcagcgaccacttcggcggcagcccactccagcgcttcgcgctcggcgcgctcacgctcggccttctcgacttcgtcgatcagcgcgttatcgatcttgcgggcggcgatttcgcgcagcgccagcacggtcggcttgtcctcggtctcgctgttgtccagcgtggcctgcacgccgttggcgagctggcgggcacgcttggatgccatcatgaccagttcgaaacggttgttaacgacttccaggcaatcttctacggtgatgcgggccatacgggctcccggcgaccggtcggccgctcagtcgaatgagggaaaggggacggagtgtactggcaggggctggacaaaatcaagccaacccctacccgattcttttggaatcagtcagttgcgcccggatcgggagtcagcagggcctggatcaggccggcgtggcggaccttctgggcctcccggcgcaggcggctggcggtgaagatggcgcacaactcgtccacggcggtgtcgaacacctcgttgacgatgacgtagtcgaactcgttgaagtgcagcatttcatcgcgcgccgcgcccaagcgctgggcgatgaccgcctcgctgtcctggccgcgcttgcgcatgcgatcctgcagggcctgcctggacggcggcaggatgaacacggtgaccgtgcccggcaccagctggcgcacctgctgcgcgccctgccagtcgatttccagcagcacgtcctggccggcggccagctgcggctccaccgactgccgggccgtgcccttccagtcgccgtgcacccacgcatgctcgaagaagtcgccggcggcgatcatttcctcgaacctttccgcagagacgaaatggtagtgctggccgttcacttcccccgggcgcatcgcgcgcgaggtgaaggagatcgacagcgcgatctgcgggtcacgcgccagggtggcattgacgatgctgctcttgccggcgccggagggggcggcaacgatgtacagcgtgccgcgcgcaacggcgtccgacggcttcgacggggcgctcatgcgcggaacccaactggttgatttcgcaaaatttttcctcggtgttccagatccggcgcggaggatcgcgccaggacggcgggggctgcgcggaacatcctggaaccaggcccggcagacgcttccccggggggcgggcacgcaactttaccagagcggccccgttgcgcgcccgccccgccggcgccgggccttgtgccacatgggcgtgcggaggcctgtgctataaccgggccgtacccaacgacagcccggaggcccgtgcctccccgccatcccaggagaacggcatgccatcgatgagccgccgccagttcctgaaagtgaccgggacaaccctggtcggctccagcctggcattgatgggcttcgcgcccggcatcgcgctcgcggaggtcaggcagtacaagctgacccgcgcgaccgagacccgcaacacctgtacctactgttcggtggcctgcggcatcctgatgtacagcctcggcgacggcgccaagaacgccgagccgagcatcttccatatcgagggtgacccggaccatccggtcaaccgcggcacgctgtgcccgaagggcgccggcctggccgacatcatccacagcaagtcgcgcctgctctaccccgagtaccgggcaccgggctccaacgagtggaagcggctgagctgggacgatgcgctggaccgcatcgcgcggctgatgaaggaagaccgcgatgccaacttcgtgcagaagaacgaagccgggcagacggtcaaccgctggctgaccaccggcatgctggcggcctcggccaccagcaatgaaaccgcggtgctgacccacaaggtcgtccgctcccttggcatgctggcattcgacaaccaggcacgtgtctgacacggcccgacggtggcaggtcttgccccgacgctaggccgtggtgcgatgacgaaccactgggtcgacatcaagaatgccgacctgatcctgatcatgggtggcaatgccgccgaggcacatccgtgcggattcaaatgggtgaccgaggccaaggcacacaacaaggcccggctgatcgtggtcgatccgcgcttcaaccgctcggccgcggtggccgacgtgtacgcgccgatccgcaccggtaccgatatcgtgttcctgggcggcctgatcaactacctgctgaccgaggaccgcatccagcacgagtacgtgctgaactacaccgacatgccgttcctggtgaaggacgaattcgccttcaaggacggcctgtattcgggttacaacgaagagaagcgcagctacgaccgttccagctgggactacgcctacggtgacgacggctacgtacgcagcgacccgacgctgaaggacccgcgctgcgtctacaacctgctgaaacaacactacgcgcgctacaccgtggagatggtcgagcgcatctgcggcacgccggccgacagcatccgccagatctgggacatgatcgcgtccaccgccggcaaggacaaggcgatgaccatcctgtacgcgctgggatggacgcagcactcgatcggcgcacagaacgtgcgtgccggcaccatggtgcagctgctgctgggcaacatcggcgtggccggtggcggcatgaacgcgctgcgcgggcattccaacatccagggcctgaccgacatcggcctgatgtccgacctgctgcccggctacctgacgctgccgaggcaggacgagcaggactacgacgcctacatcgccaagcgcacgcagaagccgctgcgcgccaaccagatgtcgttctggcagaactatccgaagttccacgtcagcctgatgaaatcgtggtggggcgatgccgccaccgccgacaacaactggtgcttcgattacctgccaaagctcgacaagccgtacgacatgctgcaggcgtacgagctgatgaacgagggcaagatccacggctacatctgccagggtttcaacccgctggcctcggcgcctaacaagggcaagctgatcagcgcgttctccaagctgaagttcatggtcagcatggacccgctggaaaccgagaccatcgccttctggcagaaccacggcgcgttgaacgacgtcgacccgagcacgatccagactgaagtattccgcctgcccaccacgtccttcgccgaggagaacggcgcggtggtgaactcctcgcgctggctgcagtggcactggaagggcgccaatccgccgggtgaagcgcgcagcgacatcgagatcatgtccgagctgttccatcgcatcaaggcgatgtacgagaaggacggcggtgcgtggtgggagcctgtgcgcgacctggcctggaagtattccaacccggagctgccgacgccggaagagctggcgatggaatacaacggcaaggcgctggccgacgtgttcgatcccaaggacccgaccaggctggtgcgcaaggccggcgagcagctggccgcattcggcgacctgcgcgacgacggcagcacctcctccggctgctggatctacatcggtgcctggggcccgaccggcaacatgatggcgcggcgtgacaacagcgaccccaccggcatcggcaacacgctgggctgggcctgggcgtggccggccaatcgccgcgtgatgtacaaccgcgcgtcgtgcgacgtggccggccagccgttcgacccgcgccgcacgctgctggcctggaacggcaagaactggggcagcgtggacgtaccggacttcaaggccgacgaagatcccgccggcgggatgggcccgttcatcatgaacccggaaggcatcgcccgcttcttcgccaaggccggcatggccgaagggccgttcccggagcactacgagccattcgacacgccactgcgcagcaatccgctcagccccggccaggcactgacgctgaacaacccggccgcccgcgtattcgccagcgatcgcgcacagatcggttcgccggacgagttcccgcatgtggccaccacctaccgcctgaccgagcacttccacttctggaccaagcacggcaagttgaacgccatcatccagcccgagcagttcgtcgagatcggcgcggccttggccgacgagctgggcatcagcaacggcagccgcgtgcgggtcagttccaagcgtggccacatcgaagcggtggcgatggtgaccaagcgcatcaaggccctgcagatcgatggccggaccgtgcaccaggtgggcgtgccgatccactggggcttcctcggtgcggccaagcccggatacatcgccaatacgctgaccaacgccatcggtgacggcaactcgcagacgcccgaatcgaagtgcatcctggtcaaggtcgagaaggtgtaggagacacgccatgtcactgcaatcgctggacatcatccgccgctcggccaccaccacgccctcgccggaagcgcgcggtgcgcacaccggccaggtcgccaagctgatcgatgtgagcaaatgcatcggctgcaaggcctgccaggtcgcctgcatggaatggaacgacctgcgcgacgaggtcggcagctgcgttggcagctatgacaacccgcccgacctgagcgaccagtcgtggacggtgatgaagttccgcgagtacgaggacgagaagggcaagctggagtggctgatccgcaaggagggctgcatgcactgcagcgacccgggctgcctgaaggcctgcccgtcgccgggcgcgatcatccagtacgccaacggcatcgtcgacttccaggaagagaactgcatcggctgcggctactgcgtgaccggttgcccgttcgacgtgccgcgcatttccaagaaggaccacaaggcctacaagtgcacgctgtgttcggaccgggtggcggtgggccaggaaccggcctgcgtgaagacctgcccgaccggggcgatcaccttcggcagcaagcaggcgatgaccgagcacgcggccggccgcgtggaagacctgaaatcgcgcggctacgggaacgccggcctgtacgacccgcagggcgtgggtggcacccacgtgatgtacgtgctgcagcacgtggacaagccggagctgtacgccgacctgcccaaggacccgcggatcagcccgatggtggaagtctggaagggcgtggccaagccgctgggcgtgctggcgatcgccgccaccgccttcgccggcttcctgcattacatcggcatcggccgcaacacggtcaatgacgaggaagaagaggaagccgaacacgaggcgaagaagatcgaagaggagcagcggccatgaagtacgccccgcacccgcggcagatcatccgctaccgcgcgccgacccgcatcaatcactggatcgtggcgatctgcttcgtgctgacggcgctgtccgggctggcactgttccatcccgcgctgtttccgctgacccagctgttcggtggcggcccgtggacgcgcatcctgcatccgttcatcgggctggccatggtggtcggctttgcgtttctggcgttccgcatgtggcgcgacaatctgccgacggccgacgatcgcgcatggatgcgcggcatgcgcgatgtgctgcgcaacgaggatgagaggctgccgccggtgggccgcttcaatgccggccagaagctcctgttctgggcgatcattggttgcctgtcggcactgctgctgaccggcttcgtgatctggcggcaatacttcagccatctcttcccgatcgggctgatccgcttctcggtgctggcccatgcgttgttcggttgggtgctggtgtgcgcgatcgtggtgcacatctatgcggccctctggatcaagggctcggtgcgggcgatgacccagggcaaggtgacctatgggtgggcgtacaagcaccaccggcagtggttccgcgacatcctgcgcggacgtcgggaagaggggtaacggcagggcctgcggccctgcacctgcagaggcgccttcgacagttccccggtgcttttggtaggtgtcgaccttggtcgacacgatgaacacggcaacaaccgatggggtcagatccgttttcctgtggaaaacggatctgaccccgaccatttcaaatggcctacagtgcgctggacgccagcgccgacaacggcgaggatggaggctggttcttctggctggccctgcatggcgcaacgcatccttgaacccggtgagatcgagacgctcgcctcgcgcgacgtgccgcgcatcatcctgcctgataccgggtcgctgttcgccacacgcgcggcgcgcctgcgcagcctggccgcgcacagcgccatcggcggttacctgcagctgctggcggcattggccgatgcacagcaggcgctgctggaggaattgacaccccagcaacgcgaggcgctgcaggaccacgcgcgcgcgcagcagtccagcgcggccgccagtgccggcatgccgttgcggcccgccaacacgcttcatctggacgggcgctggcgcgactggctgcgcacgctgtgccggcactgcgccgacgaagcggggctaccggcggaaacacggcaggaattgctgcgcgtcgccgccgccgacgacacctggctggatgcgcaggcccacgccgtgctggaacgcgctgacgcgcccccggtcgacgcggtcgctgcgctgctggtgatgaatgcattgcaggtgtattgggcagtactggcggccagcttccgccccagcgacctgaagccgctggccgatgcgccagggctgtgcccgctgtgcggcaccctgccggtggccagcgtggtgcaggcccgcccgccctatgcctcctaccgctacctgtcgtgctcgttgtgcgcctgccagtggcactacgtgcgcgtgcagtgcagccagtgtggcgccgctggcaaggacatcgcctatcgcgccctggctgatgccgacggcgataccggccaggcggtgcgcgagagcgcggtacgtgcagaaacctgcgaccactgccacagctaccgcaagatcctgtatctggaaaaagatccgtcgctggaaccggtggctgatgaccttggcacgctggcgctggacctgctgctgggcgaggaaggctatgcacgcgccagccagaatccgctgctgtggcaatccgacggcgagtgaggcgatgacagccacgccccccaccccggcatcggcttccgcgctgccctcgctggaccggttgctgcgcctgcctgccttggcaacactgatcgagggccacggccgcagccgcatcacccagttgctgcgcgtacatctgcaggcgctgcgtgagcgcatcagtgccacgcagctctcggccgagcagttgcatcaggccattgaaggcccggcactggtcgcggcgctcgacgccgcactcatcgccgatgcacggctgaacctgcagccgatgttcaacctgaccggcaccgtgctgcataccaacctgggtcgcgccctgctgcccgagtccgcggtgcaggccgtcacccgcgcgatgaccgcaccggttgacctggaattcgacatcactcgcggccgccgcggcgaccgcgatgcacgggtgcaggcgctggtctgcgagctgaccggtgccgaagccgccaccgtggtcaacaacaatgcggcggcggtcctgctgctgctcaacagcctggccaaccgccgcgaggtggtggtgtcgcgcggcgaactggtggagatcggcggtgccttccgcattcccgatgtgatgcgcagtgccggcgcgcggctgctggaagtgggcaccaccaaccgcacccacccggccgacttcgcccatgccatcggcgcgcgcaccgcactgctgatggaggtgcacgccagcaactacgcgatcaccggcttcaccgccaaggtcgacaccgcggcgatggcagcgatcgcgcacgaccatggcctgccgttggtggtggacctgggcagcggcagcctgtgcgacctggcggccttcggcctgccacacgagccgaccgtgcaggaaacactggcggccggtgccgacctggtctcgttcagtggcgacaagctgctgggtgggccgcaggccggcatcatcgccggccgcgccgacctgatcgcgcgaatcaaccgcaacccgctcaagcgtgcgctgcgcatggacaagatgggcctggccgcgctggaggcggtactggcgctgtaccgcgggccggagctgctggcgcaacggctgccgacactgcgtacgctctcgcgcacgcagcaggacatggatgcgcaggcccagcgcctgctgccgccgctgcgctcggcgctgccgaccggctacatgcttgaacaggcacggatgcacagccagatcggaagtggtgcgcagccacaggcgcagctcggcagtgccggcctgcgcatcaccactgcgcaacgtggcggtctggaccgcctggccaagcgcctgcgccagctgccgcgaccggtgctgggccgcatcggcgaggacgcattgtggctggacctgcgttgcctggaaccggccgacgaagcggacttcctcgcccaatggagcacgctgcaaccatgatcgtcggcaccgccgggcatatcgaccatggcaagacgcgcctggtgcgggcactgaccggcatcgaaaccgatcgcctgcaggaagaacgcacgcgcggcatctccattgaactgggctatgcctatgtcccggtggaaagcgcgaacggcacgggccccgccgcaacgctgggtttcgtcgatgtgccgggtcatgagcgcttcgtccacacgatggtggccggcgccaccggtatcgatgtcgccctgctggtcgtcgccgccgacgacggcgtgatgccgcagacccgcgagcatctggcgatcctgcaactgctgggcgtggatcgcggcgcggtggcgctgaccaagatcgaccgcgtggacgccgcgcgcatcgcccgggtcgagatcgagattgccgctttgctggccggaacgccgctgcaggattcccccgtgttcgcctgcaacagcacgtcccccgatgacgcaggcatcaacgccctgcgcacccacctgcacgcatgggccgccggcgatgccaacgcgcgccaggccgcgctgcgcagcgagctgttccgcatgccggtggaccgcgtgttctcgctggccggccacggcacattggcgaccggcgcggtacatggcggtgtcgccgcggtgggcgagcatctgcagctgatgccggccgccactgaagtgcgcatacgcagcatccacgcgcagaaccaggccagtgatcacgccatggccggacagcgctgcgcgttgaacctggccgccatcgcccgcgacgagattcatcgtggcgactggattgccgacccgcgcgcgctgctggccaccacccgcgtcgatgtgcgcctgcgcttgtccgcacgggcagcaccactgcgcgactgggcacccctgcacatccactggggcacgatgcaccggcaggcccatgtggtgctgctggaggaccgtggccaaggtgatgggcagttggtgcagctggtcttcgatgcaccggtctgtgcgatgtgtggtgatcgcttcatcgcccgcgattccgccgcgacccacacgctgggcggtggcgtcgtggtcgacccggacccgccacagcggcgccggcgcagcccggcacggctcgcctggctgggcgcactggagcagctggccacaggtgcgggaatcggcccgctgttgcagcaggcgcccttcggcattgccatggccgcgctgcaacgctactgccggcgcgcggccgaccggatcgatcttcctccagacgcacagcgcatcatcacccgcgaggacacggtggtcatccttgcctcgcactggcaggtcctgcgcgagcaggtgatcacatcgctgcatagctggcatgagcgacgcccggacgaacccggtgtcgacagcgggcgcctgcaacgcagcaccctgcccgcgcttgcgacggggctctggaatgcgctgctgcaggacctgctggacgacggcagcgtgcaacgcgtgggcgcctggtggcgcctgcccggccatgaccatgcgccaccggaacgcgagcgcctgctgctggaacgcgtgctgccgcaactgcacgccggtggcttcgatccgccgtgggtgcgtactctggccgccgacttcggactgaccgaagacgatgtccgcgccgtcctgcgccgcgccgccgcacgtggcgaactgttccaggtggtgccggacctgttctatgcacccgcacgcattgcggaactcgccgcgatcgtcgcgcagcagtcacaggccagcggcgcggtggatgcggcggccttccgcgatgccatcggcctgggccgcaaacgcagcatccagatcttggagttcttcaatcgcgttggctacactcgacgcgtcggtgaccagcatcggccgcgcggcgacctgcagtggaacgcagcccgcgactgagcccgccggtaccgccgtactttcggaaggcatgcgcatccgggcatgcggctgggcttcaaacccagtagggggcgtcgatcgttccctggtaggttcgactcctgctgccttccgccattcgtgtttccgcaggagatgtcggcatggccacgcacgcgcagtcacccgccccatccacggccgatgccacgcgacgactgacctctctcgctcatggcggcggctgcggctgcaagatcgcgccgggcgtgctgagcgaactgctgcgcggcgttccagcacttcccgcaccgaccgaactgctggttggccgcgagaccagcgacgacgccgcggtgtaccgcctcgatgaccggcaggcaatcgtcgccaccaccgatttcttcatgcccattgtcgacgacccgttcgacttcggccgcatcgccgccaccaacgcgttgtcggacctgtacgcgatgggcgcgcggccgctgttcgcgctggccatcgtcggcatgccgatcaacaccctgccgcaggacaccatccgcggcatcctgcagggcggcgagcgtgcctgcgccgacgccggcatcgtggtggccggcggccacagcatcgattcggtggaaccgatctacggcctggccgcgatcggcgtgctcgatccgcagcggctcaagcgcaatgccgatgcccgcgccggcgatgtgctggtgctgggcaagccgttgggcgtgggcgtgtactcgtcggcgctgaagaaagaagtgctggatgcagagggctaccggcagatgatcgcgtcgactacccgcctgaacagcgtgggcgtgccgctggccgcgctggacggcgtgcacgcgatgaccgacgtcaccggcttcggcctgctcggccacctgctggaagtgtgccgcgccagcggcgtcgctgccgaagtggacagtgcacaggtgccgctgctgccgcaggcgctggagctgctgcagcgcggctgcgtgaccggcgcctccgcccgcaactgggcctcgtatggcgccgaagtgcgcttcgccgaacgcttggccggccactggcagccactgctgaccgatccgcagaccagtggcgggctgttggtgtcctgcgccccggaggcagtgaatgcggtgctggcctgcttccacgacgcagggttcggccaggcggccgtggtcgggcgattgggtgaaggggcgccgggcgtcagcgtgcgctgatgcgctggaacgacaagggcgcccgaaggcgcccctgctgtatcgctgcacgcaacatcactcgatgttctgcacctgctcgcggatctggtcgatcagcaccttcagctccaccgcggcattggacgtgcggctgtccaccgacttcgagcccagcgtattggcttcgcggttgaactcctgcagcaggaagtccaggcggcggccgaccggctcgcgctgcttgagcacgcggcggatctcgacgatatggctgccgagccggtccagctcttcatccacgtccagcttctgcagccacaggaccagctcctgctccgcacggcccgggtcgaccgggtgcggcaagtcagccagacgggcggccagcttggcgcgctggccgtcgcgaatggccggaatcaaggtgcgcacttcggtggcgatgcgttcgatgccgtccacgcgttcgctgatggccgcagccagcttgccgccttcgcgctcacgcgcttcgacgaagccgtccagcacttggtccagcagggccagcgcctcgacctgcagggcggcggcatccgtggcctcgccgcgggtcacgcccggcaactgcagcagatcggtgaagctgacctgcaggttcgggaaatcggaggtcaggcggtgggccaggcggcccagctggcccagcagggcctcgtccacctgcaggttggcagccgcctccggcgcgcgcaggcgcatcaccagatccagcttgccgcggctcaggcgcgcggcgatacgctcgcgcagctgcggttcgagcgcccgcagttcctcgggcaggcgggtgccgacctccaggaagcggtggttgaccgagcgcagctcgcagcccagcgtgccccacggggtgacccgctcgccgccggcataggcggtcatgcttcgaatcatggaatgtgtccggtgcgtgcaaagggggaatggtaccctagcgccctcaccagagcccccttgcccgccccgtgaaggccgcgggcgtggcggcgtactccctcgccattacggaacccgcaccatgtccgattcccgccccagcggccgccagcccgaccagctccgcccggtcgtcatccaacgcggcttcacccgccacgccgaaggttcggtgctggtgtgcttcggtgaaacccgcgtgctgtgcaccgccagcgtcgagaaccgcgtgccgggcttcctgcgcggcaagggcgaaggctgggtcaccgccgagtacggcatgctgccgcgcgccacccatacccgcagcgaccgcgaagcggcccgtggcaagcagggcggtcgcacgctggagatccagcgcctgatcggccgcagcctgcgtgcctgcgtggaccgcaatgcgctgggcgaacgcaccatcaccctcgactgcgacgtgctgcaggccgacggtggcacccgcaccgccgccatcaccggcgcctatgtggccctggtcgatgcggtgaacgtgctgatgaagcgtggcgacatcaagcgcaacccggtcctgggcgcagttgcagcagtgtcggtgggcgtgtaccgcggcaccccggtgctggacctggactacgccgaagacagcgactgcgacaccgacatgaacgtggtgatgaacgacggtggcggcttcatcgagctgcagggcaccgccgaaggccacgccttccgtcgcgatgaactggacgcgctgctgggcctggccgagaagggcgtggccgagctgctggccgcgcagcaggcggcgctgtcggcatgaaccggcgcatcgccctgaccaccctggtggttgccgactatgacgaagccattgcctggtacaccggcaagctcggcttcgcattgctcgaagacatcgaccaggggcacaagcgctggctggtggtcggcccgaccgacggcagcgccgccgccctgctgctggcccgtgccagcgacgaggaacaacgcagccgcgtcggcaaccagaccggtggccgcgttgccttcttcctcaacaccgacgacttccaccgcgaccacgcggcgatgctggccgccggcgtcgagttcctggaagcgccgcgcgaagaaccctatgcaacggtcgcggtattccgcgacctgtatggcaacacctgggacctgttggagccccgtcaatgaagaaactggtactggccagccacaatgccggcaagctggtggagatgcaggagatcctcgccgacctgccgctgcagatcacctcggccgccgagctgggcctgggcgacgtggaagagaccggcctgaccttcgtcgagaacgcgctgctgaaggcacgcgccgcctgcgaagcgaccggcctgccggcgctggccgatgattccggcctgatcgtcgatgccctgggtggtgcaccgggcctgtacagcgcgcgctatgccggccacccgaccaacgccgctgccaacaacgccaagctgctggacgcgatggccggtgttcccgatggccagcgcagtgcccgcttctatgcggtgatcgtgctgctgcgccacgccaccgacccgcagccgctgatctgcgaaggccgctgggaagggcagatcatccgtgagctgcgtggcacgaatggtttcggctacaacccggtgttcctggacaccacccacggcctgaccgccgcggaaatggagccggcgctgaagaacgccatcagccaccgtgccattgccctgcagcagctcaagcagcagctggcgacgctgtactgacgcccgacctgatcgaaccagggaagccggccaacggccggcactaccgatgaagcccatgccgcacgcccacgaccactgcaaccacctgcccggcgaagcctgctccgctgaccacgacagcgcaccgcggctggtgccgccaccgctgtcgctgtacgtgcacctgccgtggtgcgtgcgcaaatgcccgtactgcgatttcaattcgcaccaggccaagggcgagttgccgttcgaggcctacatcgatgcactgctgcgcgacctggaccaggacctgccgctggtctggggccgggtggtgcacagcgtgttcttcggtggcggcacgcccagcctgttcccgccggaggcgatcgaccgcttcctgcagcaggccagcgcgcgcctgcgctttgcccccaatgccgagatcaccctggaaaccaacccgggcaccgccgagcatggccgtttcgaccgctaccgcgcggccggcgtgaaccgcctgagcttcggcatccagagtttcgacgacgccatgctcaagcgcctcggccgcatccacgacagtggcgaagccgagcgcgcggtgaagatggcgcaggacgcgggctacgacaatttcaacatcgacctgatgtatgcgctgccggaacagaccctggccggcgccgaggccgacctggagcgtgcatttgcactgcaaccggcgcacatctcgcactaccagctgaccctggaaccgaacacggtgttcttcgcgcggccgccgcagggcattcccgatgaagacaacgcctgggacatgcaggaacactgccaggcattgctggctcaggctggtttcggccagtacgaggtcagcgcctatgcgcgccccggccggcaaagcgcgcacaacctgaactactggcgtttcggcgattacctgggcatcggtgccggtgcgcacggcaagatcagctcgggcgccgaagaacacgtgctgcgccgctggaagctgaagcatccgcaggcctacctggacagcgctggcacgccggcctctttcgggggtgacgatgtgatcgcagccgagcgcctgccgttcgagtacatgctcaacctgctgcgcctgcacgaagggttcggccttcgcgatttcgagtcgcgcaccgggctgccgcgcggcgtgctggacgctccgttggccgaggccgtccagcgcggctggctggaggtggcggagggtcatgtgcaaccgaccgagctgggccgccggttcaccaacgatgtggtgagcctgttcctggaggaataagccttccgccataccgggtagtgccggccgctggccggcactctggtaaagacagcgctgccggccagcggcaggcactaccgttcatccgtcggccctgcccgatgaacgtgagacacgttcagcctaaagtagcgccgactgcggccgacacggtagattcacaggatcgatccgcgggaatccgggtaccgctcgccgatgtcagctgtcttttccatcacctctgccgacaaagcacgcctggccgccagcgacctgccatcgcgggtgcgtgaactgctgggtgcgttgatcggcctgtgccggcaaacgctggccgcgcccctgatcctgaccgtcgaagcgctggagcagacgctgctgcacgacgccgaccgtgcacgcaatccgatgcagcaggcggacctgatggcccagcgtggccagctgcacgccttcgccggccatttcgccgaccgcatgctcgatgccgtggccgaagcgctggcgggcctgcgcgagccgtccaccgtcgctgcggcccctgcttcgccgccgccgctaccgggcgcgctcggcctgtcgctggtcgatgagcacgaggtggatcgcgacctgctgctgaccgaaatgatccggcgcgagaccctgcgttcaaccaatacgttgaacctgctgggacagcgcctgggcgtgctcgcggcggcgccggcgttcgaggccgacaccctgccactggcaccgcaggccctgtgcgcgatggtgcgccggatcgccgaacaggacgcccttggcgtggaggtgcagcttgcgctgtaccgcagcttcgaacggcaggtgctggaacgcctgggcgatgtgctggaccgcgccaatgcgctgctggcccagcatggcgtgctgccgggcctggtctacaccccgtacctggcacgctcgtcgagcacccggcggatcatcacccagtcggtgggcggcggccgcacgacccagcctgccaagcgttccgccgcgccgttgaccggctggaacggctccgctccggccggttcctggtcgaacctggtgcaggacgcattcaacgacgcgggtacgccgggcgcagccaccgctggcgtgaccacgtccaccggcagtgcgctgcatgaattgctgcagcaggcccgccatgccactgcccctcctgcggacaccgctgccgtgcccagtgcggccgtcgatgcggtcctcgcgcggctgcaggcccagtccagcgcggccaccggcgtcgccgacctgcaggctgcggtggtcgcccagctgcgcagcgagcacggcgcgcaggcccagctgggcagccacgaccgcgacaacctcgacctgctgcgcctgctgatgcagcaggtgcagcaacagcagcgccccgacccggtgccggccgccctgctggcgcgcctgcaggtaccgctggcgcgtgcggcgatggccgaccccggcttcttcgtgcgcgatgaacaccctgcacgcgaactgctcaaccagattgccgaagtcggcgccaactggctgggcgacgatgacgtggacccccagctgctgcagcgcatggcgcagagcgtgcagggtctgctcggccaggatgcacgctcgcccgaggccttcgccgccgccaacgaagacgtacagcagcatcagcgcgcggcggcccatcgtgctgaactggccgagcgccgccacgtcgaggccgcgcgtggcaaggaacggctggaactggcgcgtcgccaggccaatgcgcagatcgaccagtgctgcgacacacaggcgccgccgcgcttcgtgcagaccctgctgcgccaggcctgggccgatgcactcaccctcacccgcctgcgccatggcgaagattcgccgcagtggcaggaacgcctgctacagaccgagcgcatcgccgcggtgaccgcgcaggccgtcgatgccaacggtggcaccgatgcagtgctggccaacgaggtggaatcggcgctcgtgcaggtcggctatcacgccgaggaagccgccgccgttgcgcgccgcctggccacgccaggaggcgaggatgaaagcacctcgcgcaccgagctcagtgcgcgcctgaaggcacgtgcacgactgggcgaacatgctgccagcggcagcgccgacgccccgcgcacgccgcgcagcagcgccgaagaggcggcctaccagcagctcgtgaccctgccctttggcagctggttcgacatcgacaacggtgacggcaccctgcgccgccagcgcctgtcctggtacagcctgctgaccggtcacgccctgttcgtcaatccgcgcgggcagaagatcgccgataccgaccttgatacgctggcccggcagctcagcgccggacgcgcgcagctggtcaccgaagacaaggggcggctggtcgatcgcgcatggcaggccagcctcggtgcgctgcgtgcgctggccggcggccgttacagggaggcgtccgtttgaacgtgcaaccgccgcaggacacccgccgcgcgccgcgtcgccaggtctcggacctggtaccggtcaccgaccagatgcgcgaatgcgtggtgggccggctcggcaatgtctccgagactggcatgttgatgctggccagcaccccgctgcgcgaggacgcgctgtaccagttccgcttcccgttgccgatcggtgacggccgccacgaggccattgacgtgggcgtgcacctgctgtggagcgagccggcgcatgtgcccggccagagctggaccggcttccgcttcctcaccctgtcacgcgaacatcggcagctgctgcgccagtggataggcgaagacagcgacgaggcaccggtttcgacggcctgagtgccggttccagcacagcggtttttcccggtatgcggcagaatctagggccgttttccgtgtcgagccaccgcaatgatccagcaagaccccggcgccctgtaccccgaccacctggccgtgctgtgccgacgtgccgaacaggcgctggcccgcggcggcttcgaccatctggtcgtgcccagcggcaccctgcactaccaggtgttcgacgatcgcgactacccgtacgcggtcaatccgcagttcaaggcctggctgccgctgacccgggtgcccaacagctggatcgtgttcaccccgggcaagcgcccggcggtgatcttccaccagcccttcgattactggcacgtggtaccggacgcaccgagtggctggtgggtggagcacttcgacatccacatcatccgcaagcccgaagaggcgctggccctgctgccggccgacccgtcgcgctgcgcgatcctcggcgagccgcagagcgcgctgggcagctacgtgccgaacaacccggcaccggtggtgaactacctggaatggcaccgcggcagcaagacgccgtatgagatcgcgctgatgcgccaggcgcaggtgctgggcgtgcgcggccaccgcgccgccgaagccgcgttccgcaacggcgccgacgaattcagcatccacatggcgtactgccaggccgtcggccaggatgccaacgagctgccctacggcaacatcgtggcgctcaatgaacatgccgccgtgctgcattacaccgagctgggccgcaaggcgccgcagccgctgcgcagcttcctgatcgatgcaggcgccagcgcgcacggctacgccagcgacatcacccgtacctacgccgcgcagggccacgacgaattcgctgcggtgattgctgccgtcgacgccgcccagcagcagatgtgcgcagcggtgcgcccgggcttcgactacaggcagctgcacgtggacgcacatctttcgctgatgggcgtgctgaaggacttcggcgtgatcaaggtctcgccgcagaccgcgctggagaccggcgtcagcgccgcgttcttcccgcatggcatcggccacctgatcggcctgcaggtgcacgacgtggccggtttcgcggccagcgacgagggcggccgcatcgagcgcccggcgggccacccgtacctgcgcctgacccgcgtactggaaccgggcatggtggtgaccattgaaccgggcctgtacttcatcgacatgctgttgaacgaagtgaaggatgccggccatggtgatgcgatcaactgggaccgcgtggatttcttccgtccgtatggtggcatccgcattgaagacgaagtgctgtgcaccgagggcgaggcggacaacctgacgcggccggcgtttgcggcggccaacggctgagcccctcgtggttgggcgctgatatcaaaggccgcgcttggccgggcggggtgggtttgcaggacacgccgtaaacccatccatgggggctcgatggcgccatccatggcgccaacggtcctgcaaacccaccccgcccgtcctttgacagtttcctgctgcgtccaaccacggaaaaagaagaaagaaaagcagaagcgggtcgctcgctgcgctcgctccgtgtcgaccaaggtcgacacctaccaacagccgcgcgcgccaataaccgcggttgccaacagccgcgtgaacctgtcgaagccggggtactgtgggtttgcggggtgtgagcggcatggatgccgcgaccaagcccccatggatgggttcacggcgtccccgcacacccacagtgccccgccatcccacggaatgcgcgctgttgctgttgctgttgctgttgctgttgctgttgctgttgctgttgctgttgctcttgctgttgcctctgcgggtgcagggctgcaagccctgcagaacaccccttaccccgccatcaccgcttcaatctcgtcggcgctgcgcgccagaccttcggtcagcacgcgatgaccgtcgtcggtgatcagcacatcatcctcggtacggatgccgatgccgcgccagcgcggttccaccgtcgtatcgtccacgccgatgtacagccccggctcgatggtgaatgccatgcccggctccagcagccgcgaatcgcccgccaggcggtattcgcccacatcgtgcacgtccagcccgatccagtgcccggtcttgtgccggtagaaacgctggtacaggccttcggacaggttcttttccagcgtccccttcagcaggcccagccgcagcaggccctcggtcagggtctgcactgcggccaggtgaccggcctcgtacggcacgcccggcctggcctgggccagcgcggcggcctgcgcatcgccgaccaggtcgtgcagtgcacgctgctcggcgctgaagcggccattcaccgggaacgtgcgggtgatgtcgctggcgtagccacggtactcggcaccggcgtcgatcagcaccagctcgccgtcgcgcgaacgcgcgttgttgtcccggtaatgcaggatgcaaccgttgcggcccgcaccgacgatgctgcaatacgccggcactgcatcgctggcgcggaacacgcgttccagctcggcctgcagctcgtattcgtggatgccggccctggcagccttcatcgccgccagatgcgcacgcacgctgatctgcgcagcgtggtgcatcagcgccacttccgcgccggacttgaacaggcgctgctcgtgcagcaggtggcccagttcaaggaattcatgcggtggctgcgcgccgtggcgcacctgcgaacgcacgcggttgacccagccgatcagcttcaggtcgaaatcggcgtcgcgaccgaagtggtagtagacgcgcgaacggccttccaacaggcccggcaggatgtcgtccagatcatcgatcgggtacgcatcgtccatgccgtactgcgccaccgcgccttcctggccggcacggctgccgtcccaggcttcgcgctcggcatcacgttcgcggcagaacaggatggcctcaccgtggcgccggcccgggatcagcaccaataccgcctccggctccgggaaaccgctcaggtactggaagtccgagtcctggcggaacgggtaatgggtatcgaggctgcgcaccttctcggccgcggccggcagcaccaggatcgcgtcctcgccggccatgtccatcagctggcggcgccgacgcttgtattcgccggccgcgatgccggtgcgctgcttgatgtccatcagttcaggcgctgccgatggcgcgaggccagcaccacgtcaccgtgcagcagcagtaccgccacgcggatgaactcctcgatctccgacagggcttcgtcgtcatcatcgccacccgcttcgaaatcctcgctggaggcgcgtgccaggctggccatgtcggtcagcgcttcttcaccctcttcggacaaggtcgggcggcggccgccgctgcccaggccgaacccccccaggaacgagcgggtccagctgaacatggcatcggcctgcgcggacacgtcgtcgccgtctgtcagcagcagttcgaaggcgaagtcgcggtcttccagctgcttgatggtcgcctgcagcagctgccccagcacgctgtcggcagccaccggcggcaggttgtcgtcggccagcacccgtgccggccagtcgttgccgggggcgccaccggcggccagccagccacacagcgcaccgtgcagctcggcagcggtagcgcccaggcccagttcctggctggcgcgggtaacgtcgtcgacggagggaagttcggtcatcgtgcggctcgttcggaaaggaaacccggggcgcgcacgcgcgcgcccatgagaccccgtagtgtagcaacccggcggcgtcctctctgcggccgccaggccttgctgcgacaacgcttgaccgcccttgcccggcttgcctatcgtgcccgcatggaacccgccgatccccttgcccagctgcaggacttcgccgcccgcgtggaagcgttgctcgaacgcaaccagcgcctggccgaggagaaccgcagcctgcgccaccagcaggaacagctggtggccgagcgttccacgctgctggccaagaacgagcaggcacgctcgcgggtggaagcaatgatcagccggctcaaatccctggagcagcacacatgagcgccgaaccggtcagtgtccgcatcctcgatcgtgaatacacggtgggtgtcggcggcgatgaacgcgacagcctgatggccgccgcgcgcctgctcgatgcgcgcatgcgcgaaatccgcggcagcaaccgcatggccgccgtcgaccgcgtcgccgtgctggccgcactgaacctggcccacgaactgcagctgctgcgcgacgagaacgcccgccaggccgtggccctgcagcagacgctggccgacctgaacaggcgcctggaccgcgcgatcgacggcaccccctagaaaaaggggacggaggggattaaggcgcattcgccccatgcgtgccggaaacgtcttaatcccctccgtcccctttttcgcatatctgaattggcacggactgttgccgacgaacggcctttccagaccctgcatgctggctataatggccacgcgttctctgcggtactcgacggcatgtgcaaacattcgccttgtcccttaagaacgacaccgggagcgcgacagcgccgggagtgcaggtccgccttgtagcgggaagcccgatggttctccagcgttcccacttgagcccccgggttcaaggtcgtttcgcatgcatcgacattgcggagaatgcaatattccagcaagggcggcgtcttcgggcgtcgcccttgttctttccggcacaatggcggctgatccttgccgcacgctgccatgaccgacccgcgccaggccctgcgccacgacctgcggcaacgccgccgcgacctttccgccggtgagcgcatcgctgccgccgaatcccttgccgatgccctgctcgccctgccgttcaccccacgcgaaggcgccgtggccggctactgggcgctggatggcgaaatcgccctgcaccgctggcagctgcaactgcccgaaggcctcacctactgcctgccggtgctggccggcgaggtgctgcgcttcgcgccgtggcggccgggacaggcgctgaccagcaaccgctacggcattcccgaaccggacgtagcgctggacgatacgctggaaccggcgcagatggcgctggtggtggccccgctggtgggcttcgacgcacagtgccggcggctgggcatggggggcggctggtatgatcgcagcttcgccttccgccatgaccggccggcgccgccctggctggtcggtgctgcgttcgcggtgcagcaggtcgagtccttgccggtggcgtcgtgggacgtgccggtggatgcgatctgcaccgaagacggcaccctgttcccctccgctgcccccgtgaacgcatgaccgcccgcaagcgctactggctgatgaagtccgaaccggacgccttctccatcgatgacctggccaaggtcaaggtcgaaccctggaacggggtgcgcaactaccaggcgcgcaacttcatgcgcgatggcatgcaggtgggcgacggcatcctgttctaccactccaataccaaggtgccgggcatcgtcggcctggccacggtggccagcaccgcctatccggacgacacccagttcgatccaaaatccgactactacgaccccaagagcacgcgcgagaacccgcgctggatgctggtggacgtggccttcgaccgcaagctgaagcaggtgatcgcgctggacgagatcaagctgcacgccgaggaactgggcgaaggcttcccgctggttgccaagggcaaccgcctgtcggtgttcccggtgaccgccgcgcagtggaagctgctgctgtcgctggaaaagaaatcctgattccctgcctgagagttctcccatgtccgaagccaagcgcctggccgccgagaaagccatcgaatacgtcgaagacggcatgatcgtcggtgtcggcaccggttccaccgtggcctatttcatcgatgccctggcccgcatccagcaccgcatcaagggcgccgtgtccagctccgagcagagcaccgcgcgcctgaagcagcacggcatcgaagtgatcgagctgaaccacagcggcaacctgtcgctgtacgtggacggcgccgatgagtgcgatccgaacaagtgcctgatcaagggcggcggcgccgcactgacccgcgagaagatcatcgccgaggccagcgagcgcttcatctgcatcgtcgacccgagcaagcaggtgccggtgctgggcaggttcccgctgccggtggaagtgatcccgatggcgcgcagcctggtcgcccggcagatccgcgacatgaccggcggccagccgacctggcgcgaaggcgtggtcaccgacaatggcaaccagatcctggacatccacaacctgcagatcaccgatccggaaaagctggagcgcgagctcaaccaactgccgggcgtggtctgcgtgggcctgttcgcgcgccgtcgcgccgacgtggtgatcgtcggcggcgagccgccggtcgtgctctgacccttccgaaggatcctgacgatgtcgctgttgcgttcgctgctgatgcttccgctgctggccctggccggctgtgccaccgacgcggcccgccattgggtcgaactggatggcgcccgctaccaggtggagctggccaccaatgacgaaacccgcgcgcgcgggctgatgttccgcgaccagatggcggccgaccacggcatgctgttcatccacgaccgcgaagaaatgcaggcgtactggatgaagaacaccaggatcgcgctggacatcctgtacttcgacagccagcgcaggctggtcagccagcagcgcgacgtaccgccgtgctcggctggcgacatgtgcccgccctaccccagcggtggcccggcgcgctacgtgctggaactcaacgccggccaggccgagaagctgcagttgaaggacggcacggagctgaaattcggcccgggcatcgaaaagtaaggtacggccgggccgcgcccggcacccgcagtagtgccggccgctggccggcaaccctgcaggggtcagatccccttcgcgtgcgaaagggatctgacccctgcatttttcacgcggcaccgcttgaaacggcctgcgaatgacgccagtctgtggccatgcaggaccggatcacactccccgactgggatgcactggccgacctcgaagacgaggcgctgccactgttgccgaccgcgctgctgatcgcgcgcgatgaataccccgatctgcagccgtcgacctacgatgcgctgatccagagccatgtcgaccacctccgctcggaagtggagagcatcgacaacagtccattgaagatggcggcgatcaaccgccacctgttcgacgagctgggctacagcggcgaccacgacgagtattacgacccgcgcaacagctacctcaaccaggtattcgagcgccggctgggcaacccgatctcgctggcgctggtgcagatggaagtcgcgcggcggctgggcattccgctcgacggcgtgtccttccccggccacttcctggtgcgcctgccggtggacgacggcgtgctggtgatggacccgttcaatggtggtcgcccgctggacgtggacgaactgcgcgaacgcgccaagtcgcacctgggcgggcagatgcccgacgaccaggtgctggcgcagattctggacccggcgccggcgcgcgcgatcctgatgcgcatgctgcgcaacctgcacggcgtgtatgccgaggccggcgaatgggaccgcgccgcgcgcagtgccgaccgcctgctgaagctcgccccggagcaggacgatgcgctgcgtgaccgcggcctggcctacctgcaactggagtacctggccggtgcccgccacgatctggggcagtacctgaagcgcaacccggaagccagtgatgcgcagtggctgcgcgagaagctgatcgacctcggcggaccgatgccgcggctgcattgagggtgtcggtgtgtggaccaacggtccacacctaccctcatcaatcgacctcgaccatctcgaaatcggccttggtgaccccgcagtccgggcaggtccaggtctccggaatgtcctcccagcgcgtccccggcgcgatgccctcctccggcaggccctccgcttcgttgtacaggaagccgcagaccacgcacatccaggtgcgcaaggtggtgggggtggcatcgctcatcggataatcagggctggattcacgggccgccattgtcccatcgcggtccactcaccggtagccatcgatgacttctgcttccccggcgccccgcggcgtctacctgatcaccccggacgagcccgataccgcatgcctgctggcccgtaccgcgccgctgctggccgctggcgccacctggctgcagtaccgcaacaagaccgccagtgacgcgctgcggcgggagcaggccaccgccctgcaggcgctgtgcgcggaacacggcgtgccgctgatcgtcaacgacgacccggcactggccaaagccgttggcgcggcgggggtgcacctgggcggcaccgacggtgacatccccagcgcacgcgccctgctcggtgccgaggccatcatcggcgcctcctgctacgaccagctggccaatgcagagaaggccgtggccgccggcgccagctacgtggccttcggcgcgttcttccccaccacgaccaaggtcaccagcagccgcgcgcataccggcctgctgcggcaaagcgccgcactgggcgtgccgcgggtggcgatcggcggcctgacgccggacaatgtcggtcccatcatcgacgccggcgccgatctggtcgccgtggtcagcagcgtgttcgccgccgaagacccggtcgcgacccagcgcgcctacctcgcccagttcgcgtaacacccaggaaagccccatgaaccacgaccagtcccacgccctgttctcccgcgcccagcaactgctgccgggcggcgtcaattcgccggtacgcgcgttcaaatcggtcggtggcgaaccgttcttcgtcgagcgcgccgaccgcgcctacctgtacgacgtcgacggcaaccgctacatcgactacgtcggttcctggggcccgatgatcgtcggccacaaccacccggccgtgcgccaggcggtgaagaaggcgatcgacaacggcctgtccttcggcgcgccgtgcgcagccgaagtgaccatggccgagaccatcacccgcctggtgccgtcgtgcgagatggtgcgcatggtcaactccggcaccgaggccacgctgtcggcgatccgcctggcgcgtggtgcgaccggccgcaaccgcatcgtgaagttcgaaggctgctatcacggccatggcgactcgttcctggtcaaggccggcagcggcatgctgaccctgggcgtgccgacctcgccgggcgtcccggccgggctgagcgaactgaccctgaccctgccctacaacgatttcgaagcggccactgcgctgttcgcgcagcagggtgacgacattgccggcctgatcatcgagccggtggtcggcaacgccaactgcatcccgccgcgcgagggctacctgcagcacctgcgcgaactgtgcacgaagcatggcgcgctgctgatcttcgacgaggtgatgaccggcttccgcgtcgccctcggcggcgcacaggcgcactacggcatcaccccggacctgaccaccttcggcaagatcattggcggcggcatgccggtcggggcctacggcggccgccgcgagctgatgcagcagatcgccccggccggcccgatctaccaggcaggtacgctgagcggcaacccggtggcgatggccgccggtctggcgatgctggaactgatccagcagccgggcttccacgccgacctggccgagcgcaccgcgcgcctgtgtgccggcctggaagcggccgccgccgaagccggcgtggccgtgaccaccacccgcgtgggcgcgatgttcgggctgttcttcaccagcgagaaggtggagacctatgcgcaggccactgcctgtgacatcccggcgttcaaccgcttcttccatgcgatgctggaccagggcgtgttcctggcgccgtcggcgtacgaagccggtttcctgtccagcgcgcacgacgatgcggtgatcgaggccaccctcgccgctgcacgcgtggcgttcaaggccaccaagggctgatcgcaaaaaggggacggaggggattaagtcgtttgtgcacaaacgacttaatcccctccgtccccttttttttctaaccgaagaggaacttgcccttcatcatcgcgaagtggccggggaacgaacagaagaaggtgtagtcgccacctttctgcaggccctgggtagagaaacgcacgcgcgtggtctcgccgccgccgatcaccttggtgtgcgccagcacgcgcttgtcggccttcggcaggtagctgtcagccagggtcatgcgcatgcccgccatcgccaccggctggtaatcagcgctgcgggtcagcacccagttgtggcccatcgcggtgaccgccagcttgccggtatggcgcagggtcaggtccacggcggtgcaatcagcggcaaccttgatctcgcggctgctgaagctcatctggtcggtgctgtcgatgctcaccgcacacacccgcgccatcgccgacggcgccagcatcagcgcacccagtcccactgccaccctccaagccttcatcattgcatctcctgcggattcaagcgccattctaggcagccccctgcggcgccgtctgcgaccgtctgtcgcatgccagctccagggtttcccgcgcactcatcgcaatggcatgctcagccgatgcggatcgacctgttgctgctggatgtggatggcgtgctggtgcagtaccagcgcgggcaacgcgtgctgcatctggcccggacactgcaggttccgacgcacgccgtacaggccgcgctgtacgacagcgggctggaagcagcgcatgacaatggcacgctggatggcccggcctatctggcgcagctgggagagcttctgggcacgactgtcgatgtggctgcatggaccgcggcgcgacgggccgccagccatcctcaggcggccgtgttgcaacgattgcaggccctgcaactgccaatcgcggtgctgaccaacaacggcgcgctgatgcagcaggcattgcccaccctgctgccggaactgtttcctgccctgcaggcgcgcgtgttctgcagtgcggatttcggcctgcgcaaaccggcgccggcggtgtttctgcgcacgctggaagcgctgggcgtggcaccttcgcgcacgctgttcgtcgatgacctgttcgccaatgtgcgtggcgcgcgcgctgccggcctgcacgcggaaaccgtgcgcgatggccggggattgggcaaggtgttgaagcgctaccggattgcgtgaaccactgtagagccgagcccatgctcggctgctgtggcttggcatcgcgatgaaccgagcatgggctcggctctacgggcattcctcagcaacggggtcagagccctctccgcaggagagggatccgaccccggcatgatggcctcagcgcgcggcgatgaacgcggcaatcgccgcgcgcaggcgcttcaggccttcggccacttcttcgtcggtgatgttcagcgacggcacgaagcgcagcacgtccgggccggcctgcagggtcagcaggccgtgctcggcggcgtggtcgaggatcgcaccggcctggccggcgaagtccttgctcagcaccgcgcccagcatcaggccacgaccacgcacgtcgctgaacacaccgaactcgtcgttgatgcgggcgaagccatcgcgcagcgccttggactggcggctgacgttggcggcgatctccgccgaggccagcttgcgcagcgccacgcgggccaccgcagcagccagcgggttgccaccgaaggtggtgccgtgggcgccgaactgcatggtctcggccaccttcgggccggccagcatcgcgccgatcgggaagccgccaccgagtgccttggccagggtgaccatgtccggcaccacgtcgtcctgccagtgcgcgaacagcgtaccggtgcggcccatgccggcctgaatctcatccagcaccagcagtgcattgtgctggtcgcacagttcgcgcacgcgcttgaggaaaccggacttggccggcatcacgccgccctcgccctggatcggctccagcatcaccgccgccacgtcgccggcggccatcgcggtttccagctgtacttcatcgttgaaatcgatgtagcggaagccgccgggcagcggctcgtagccttcctggtacttcggctgggcagtggcggtcaccgcgcccagggtgcggccgtggaaactgccacggaaggtgatgatcacccgcttgtcggccgggcggccctggctggaggcccacttgcggaccatcttgatcgccacttcgttggcttcggcgccggagttgcacaggaacacgcgctcggcgaagcggctggccttcaccagctcctcggccaggtgcagcggcggtgcgctgtagaacacgttgctggtgtgccagagcttgccggcctgctcgaccagtgcggccaccaggtccggatcgttgtggcccagcccgcacacggcgatgccggcagccaggtcgatgaactcacggccctggctgtcccacacgcgggcgccctggcctcgctccagtaccacctggcggggcttgtagaccggcaggtaatagtgcgaaagggagatcagcggatcggtagcggcggtcatggcagtcggcagggttcaggaatccccattctcgcgccggaacccctgcggcacaatgcgcccatgcgaccgttttctgccccccagctgaaccccgccaccgagaccggctggcgccgccggtggttcgacatcatctaccgccacgactcgcggccctcgcgcaatttcgacctgatcctggtagtggcgatcgtcgccagcatcctggtggtgatgatcgacagcgtgcagcacctgcatgccgaatggtccaccggcctgtacatcctggaatgggctttcacgatcatcttcaccgccgagtacctgctgcggctggccgtggtcaagcgcccgctgcgttacgcggtgagcatctggggcatcatcgacctgctgtcgatcctgcccgcctacctgtcgatgttcattcctggcgcgcagagcctgctggtggtacgcgcgctgcgcatcctgcgcgtgttccgcatcctcaagctgacccgctacatcgaggaaagcggcgtgctgatgacgtcgctgtggcgcagcaggcgcaaggtgctggtgttcctgttcacggtgatcaccatcaccatcatcgccggcgcgctgatgtacgtgatcgagggccccgaacacggcttcaccaacatcccggccagcatgtactgggcggtggtgaccatggccacggtcggcttcggcgacatcgtgccgcagaccgtgcttggccgcttcgtcacgtcggtgctgatcctgatcggctacagcatcatcgccgtgcccaccggcatctacaccgcggagctggccagcaccatgcgtgaagccgagctggccgcgcgccgtgatgcgcgtggctgcccgcactgcgggctggaaggccacgagccggatgcccggcattgccgcaagtgcgggggtgaactaccggatgcattcagccattgaggcacatgccggccagcggccggcactaccaaacccgcagggtgcgtgccgggcgtgacccggcactaccctcggtagctccacgccatgcgtggatcctcctcaacgcatgcggttgctggtggtcaccaggtcgttgtaggcatccaggatcgtcgactgcgcgccctcaggatcggtggtgagccagctgcccgacgccttgcgctcggcggccaacgcatcggcggtgatcggcttgccctgctccagacgctcgacaccgcgaccggcggtacgcaccagcttgtcggccgaacgctgcacatgaccccacatcgggtcgtccttgccgacaccactgttctggacttccgtcaccagcgcctgatagtcggccagctggccgcgcaacgccgcaacgtccggtgcgtcgctctggaacgccatcgccagctgcttgccatcgccgacaaggcgcaggggggaataataggccagcgagcggccttcgctttcctcgatctgcttcagctgggcggcgcggcgatcgttctcgttcttttccagcgcagcatccatcgcttcgctggccttgaagaaatcagcataggcctgcatcagcggggtatgctggctgcgcatcccttcgccaccatcgcgacgatagtcctcgcgggtgaagtacccatcggcacgctcgatcagggtgttcagtgcctggaatgcccgctggtactgtcgcgctggtgcatccagcggcgtggcaggggtctttgccagcgcatcggtcagcggctggccgcaatagtcgacccggtgcgacaacagcttgccgggtgaacgcggctgagcttccttgccggtcgggccggcctggggatccttcatccagcccgtataggtctggaaaccctcgcggatgggctgttcaacgccgttgtaacactcgatgtaggcgttcaccttccccagcccggggtcggcgaccgccagccccgccgggttgttgcagccggccagcgcgccaagcaggagaacgggaatcaggcgtgtggatgcgttcaaatcagttccttgcaccagtgaaaactgcaggcatcttcatgcatggcgcgggcgcgcgctccagcacctcgggaaggtgctggcattcggggctgcggggcgcgtcatgtcgcaatcatcctgctcgatcgcgacaaaaataacgttgagcttcgctactggcggttgctctggaaaaccagcgagttgtattcctgcatcagcttgttggcggagccacgcggcgccatcgagggcgaatccagcatgcgtcgttcgaaatcgctgtaaggctttttctcgccgacgcgctgcagccgctccttgccttcgcgacggaagttctcggcttcacgctcgaagctgttccagtccagcttgcccggctcctgatcagccaccttcgcatgcgcttcgtcggaaatgcggttgaacgcatccaggcgctcgcgcgccttggcctgatcgaagtcatcctcactcatcagatccatgatggccttggcttccagcatcattgccagacggtagtactcgcgcgtgcgtccctcggcctgttccaataccttgagctgctcgcgctgggcggcgtcgttctggcgctccagctcggcgttgaacgtttcgctggcagtcacgaactccttgaaggcggccatcaagggcgcgtgcagctgctttcccttggcgaactggtcgtcttcgtagtcctggcgatcgtaatagtcgtgcgcgtccttgctgagcggcaccagtgccttcagcgcctgctggtaatggccagcagcggcatcgagctcagccagcgccggcttggcagccatcgcctcggtcacggggccatcgcactgcttcatgtcgtaatcgctgatctcgaacggaccgtacacctgggtctcgcgcccgctcgggccggcctcgacgtccttgatccagcgcgtataggactcgatgctgccgtgggtcttcgaatcaagcgtgttgaagcagccgatgtaggcgttgagcttggcggtcaactgctgctgtgcgtcggacggcgccgcgctggcgtcgggcgtgctggaagggccggcgtcgccagtggttgccggtgccttgccgccgcaggcagccaggacaatcgacagcgaagcggccagcgccgcgacggaaagagtgcgtgacatgggttcacgtccttgttgaaaacgattacagccgcgcattctagcgcagcaggccgaaggtcgcagccctcggcctctgccggcgacgcgcgatcactccaggaacagatccggcaacaacggacgcgatggatccaccgcatagccggacagatcggtgatacccgcctgtgccagcacgtcatcgtcgatcaggaactggccgtggaaacccgccgcctcgcgcaccagcaccgcgtgcgcagcatcggccatgatctgcggcgtgcggcagccggccgcatcgacgcccggaatcatgttgatcgcatcggtggcgatcaccgtgcgcggccacagcgcgttcaccgccacaccctgcgggccgaattccgcggccaggccgagcgtgacgaagctcatgcccatcttcgccagcgtgtagccggtatgcgcgccccaccacttcggttccaggctcggcggcggcgcgagagtgaggatgtgcgggttcggcgcctgcagcaggtacggcaggcaggcctgcgcgcacaggaagctgccgcgcgaattgacctgctgcatcaggtcgaagcgcttcatcggcgtatccagcgtgccacgcagccagatcgcgctggcattgttgaccaggatgtcgatgccaccgaaggtatcgaccgtggccgcaactgcggcgtgtacctgctcctcctcgcggatgtcgcacttcagggccaggccctgcccgcctgccgccgtcaccgcttcggccgcggtatggatggtgcccggcagcttcggattcggcaccgacgacttggccgcgatggccacgttggcgccgtcgcgcgcagcgcgcagtgcgatggccaggccgatgccacgcgaggcaccggtgatgaaaagcgttttgccctgcaggctgcccacgtcccacactccagcgtatgcaatgagccgctagtatgccgcgccgacgtggagttcacccggccttgacgatacttgggcctccagacaacgcacgaggtccacgccatgcgccgttcccgcctgttgctgcctgccctggggcttgccctgctgaccgcctgccagggccgttcgccggaaccgggcaaggagccacctgccggtgacacgcccagcgcggagaaggccgccgccgacggcaagctgcgctggagcgaggccgtggtgtgggatggcgacctcaacgcctgccgccagggcgagaacgccgccacgcgtgattgcctgcgcgatgcgatgcgcgccggcggcgccagcgccgatgcgatcaccgccgccgaacagctgtccaccgggggcgagctggcctacgtgacggcctggcacgagaacgaaggcctgggcattgcgacggtcgagtatccgttccgcgccaacaccaacgagggcacccgcctggtcgacgccaccggcaagcgcatcgatgtggatgccgtgcagctggacgacaccctgcgtgccgaccccgccgtgcaggccctgctgaaggaccacccacaggccacgccgttcgcaccggcgcagtcggccggggccacgccgctggagaacggtggcgtccgcctgcagtaccgcacgccgctgcgcgactgccacgcctgcccggatgtgggccagctgcagatcgcgtacgacttcgacgccaagcgcaacttcattggccagcaggtggtgccggcgacgccgtaaggcattaagcgttagcgttaagcgccgagatgctctgtggaccgggccatgcccggcgacatcaaccgcgcgaagcatacatatcggctttggcctgaccacaaagccgaacgacgaccgcagcagcagtttctcgcatctcgcgacagagagaatcaacgggatcgctgatagaaggagtcagtcgtcagccgactttcaattaccgatcgaacataggcagcccgcgccttgcgggactgcgagtattcggcaaaaatcgtcattgcttcggacctcatctcagtgccgccggtggtcgtaaatacgaaaaatgaaggctcaagataaccaacagtctctcgcataaaccgcttgcactcatcaagcggaaaatctgcggcgtagtccgcccaatcgatatagcgcctccagaaagcaggcgccccccattccccgcatctctcatcaacaaagagcttcaactcagagagcatgtcggcgcatgcatctacagtttcatcatctaaatccagcgaagcaacgcgaccgggatcaaccgcctgccaacaaaaaaccataaaatccgcaacaaagctctcttcacagccctcgaagaaattactcttgtaccaggcaagagttttcgccacatcagtcaattcatcagaatcaatcatcatcttacctttccggcggcattaacgcctgcgttgactatctcaccattccgcacatgaacccaaacctgcgcccctcccctcatcgtctgagtgtacgtactgacaccggcagaggctgcatcttgcgtcattagccgcgcggcaaccgcatccacccttaggttcgccgggtttgagctgacacgctggaaaagaccaacaaatctcatttgtgaagcaaccgtagtgggattcacatgccctgcggcgcttctaaatacatgctctgctcgtaccgcaaaattgaatcgagcaagcattggaattgcagcaggaacagaagccagccctccgccgccccgcgagtacattgcgggtatcgcgatatcatgaaaaagggcaccgacgtcaaagatgtttccattctttgtcaaatctcccgacaagccaagacgcgactttatctcttgccagttggagtttgattctccgccagatgccacgctcggagatgagccagaggatggcgccctcggaatcgcggagtcagatgatgtcggcccagtggccgtcgtgttcccaccggtactcttacaagtaccgtcactattcgtgattctagagccagtgcagcggccatctggatcaacgaaagtataggggttcagtgccgaatacatgtatcgattaaatagggctccgttgtccaagcccacgtcgaccggatctgtcgataggaatatcccgaccaacggatcgtagtaccgctgctgcatgtacgtcagacccgtcgccgagtccgacacatgcccggtgaatcccgggcgatcccccttcgcatcacctacggtcgcaccatagggctcataaacggtgcgctcgacgatcgcgccgttggcatcagagatggcaaccggggaacccagcgcgtcggtatgcacatactggacgatctcctgcgccgaaacactcactgtgcccagcaacagtcccaacagaacagcgacaccaaccagaattttcttgatcttcattttcaggtcaccgagggttggtcaggtcgccgtaatccacaacgctctgcggatacgggttggaccaggctgaacaaccgctggcattgcaggcgcgcacaatctgtacttccgcgcagtagaccgcgccctgagcttcgattgagctctccggaccggaatactcgagccttccgccgtaggccatcatctcgtagttggttgcacccggcatgctggtccacttcacctcgcaggagattttggtggcgcgcccttccttccattgcgacttgatggaatgaatgaactgcggcgtacccgggggcggattggaagcgacgaccaccgtgttggagaagtcactgcagccagagatgttgcatgcccttacgcgataggcgtagttgccgaacaccagaccattgcgctgcgactgggtcgaaccgtcgttctggaccgccgtccaggttccgccattgacactctcatccagcaggtagctggccgccatggcaacgcccgtccaattcaacgtgacactgcccgacgaggttcctgcgggcgcactcaggctgggcggtgccggtggccggatcactgaaacaacactcgtcgccgagtacacgccccaccccgcatcgttgccggcccggacgcggtaggcatagttgccggtccccttgccaccgaatgcctgactggtgctggccagtgaggcaacctgtgcccatgcaccattgttgaagctctcctccagtgcatagcgcaatgcgccgtcgacgctgctccacgcaatcgtatagttgccatcgagactctgccccggcacgttgagcgaaggtgccgctgcaggcggatagatcacctgggtccgggcaacatctgattcaggaccacagcccgctgggttacagccaaagacccggtacccatacgtcccggccggcttgccggagaccgcgagactgcgcgccgcgctctcctgcaccgtctgccaggcgcccgctcccacctgctcctgcaggcgataggttgccgcgcccgccgcttccgtccaagtaatgctgtagctgccattgaatgccgttgcgggcgcgcttacagcagcctttgccgcaggaggacgctgcaccacgacactggccgtcgccgaccagccactgcagctgtcctgttggcaagcgcggacagcatagccaaacgttccttccgccttcgcggacgtgttccagctacgttcggcgccgttgtagatcgtggcccaagctccgccagctgcctgctctcgcagttcataacggctggcgtaagacaccgccgtccactgcagtgcataggcaccgttgttgctgaacgcgggcgcggtcaggaccggcgtaaccggcgcgacgacctggatggcctgcgccaccaggctgccattgaggtggatgtactcggtattgcggccctcccgggcattttcctgccggcgcagcacaccgtcgttgccgtacagcgatcgaatggtggcaccgtcattggcgcccgccgacaggatgcgccggccatgtgcgtcgtatcggtatcgctccgcgctggccacactgcgcaggcgattgccgaagtcgaagctgtagccgacgccgttgcggctggagaggttgccctgtgcgtcgtagctcaagcccagagtggtggcgcctccactgttctgtacgttggtaagccggttatgggtgtcgtaccaatagacgtgatccttgacaccggtcagcgcggccgaacgcaggttgtccacagcatcgtaggtgtagcggtacacgccatctccgccaaacgaaggcgaggtggcctgaatcagacgatccagtccgtcgtaggccatggtgcgcgtgcgctgcccgtccagattgtcgacgatacgcgcgacgttgccattggcgtcgtactcataggtcgtgtccagcgctccggcactgtcgaccacccgggtaggcaactggcgctggttctgcgccatcgtgtgcacgatgccattgccataggtgaattgcttcatgcccccattggcgtagtaagtcacccctgaggcgtagcctcccgccttggtcggctggcccagcgcgttgggcgcatagtcaacgaagcgcccactcggataggtcaggcctgaaagtgcgccattggcgttgtaggcatatcccagcgactggatgccgagggtactgtcactggaggtttcggccgtcaacaacccacgcttgttgtaggtataggtgttgatcgcctgcgtcgtccccgcatcgtttgccgtggtcaccgtggccggcttgccgtcccttgtatacgtccagccctggttgccattcccatccgggaacgcaagtgtcgacagccgattgcgcgcatcgtagccacgaacgatcctgcgggccgcaaccggtccagcatcagcgtcgcatgccgtggtgctggaaaggtccaggccagctgcgctccaggcaagattgcccgctgcgtcgtaacccatcagcgttgcgccggtctccggctccacactcttgcagagctgctgatgaccgtcatacacataattgcgggcaatccgggcgctgccgtcctggttgcggcgcacgatcgagcgcggcttgccgaagatgtcgcgatcgatatcggtgaacgcgcccgccgggtgaatgatcgacaccggggattccgtcgacggcgcaccgaacgcctggaaagtggtcagcgtcgtattgcccttggggtcgaccactttcaagccgccacccgccagataactggtcagcgatgtcagcagaccggcctcgctgtcgacggacaccgaggtctgccgccccagcgcgtcgtagccggtccatgtacctgtactcagcacagcagactcgccagggtgcgaggcgaacacctgccgacccgcttcgtcgtaggcaaacctctggtagcgctgggtcacgccacgcgaggactcgtcatattcctcagtcagcagcggacgccagaaggcatcgaaatagacgttgcgccgcgcgtttccggttgcgacggtctgccgccaatgacccgctccgataccgtactcgtcgccgttgatggcggtgaaactctgtgtcgtacgtgcccaagccacactgtcgcccgccggccagtcgatggtggccatgcgtcccattgcgtcatagccgtactgggtggttgcaccgttctcatcggtaacgctgctgacccagccattgtcgtccaccaccgccgactgcacagcgccgtcggcaaactggatctgctgtggcgtgccgcgcttccagccggaaagcgtagtgcgattgccacgaccgtcatccaccatggccacggttccgtcagggttgtagcccagtacctgcttcaacaacccatacgaacgcacttccgtgggccgcatcaggccatcgaacgtcgtctgctcgaccaccacgccggtattctcgttggtgaccttcgcgatcgcgcccagaatccatctgcttcggtcgtccgcatactgagtggcatcggtgcggctgcccaaaggactggcgctattgacacgcaacgggcgagccagatcatcgaacaacaatatgctggtctggtaggtcacgccatcctgctggatggcctcggccacgaccggccgcacctgagctgtgctcggctcgtcgccactgtagatcatcccgtgaagcggggcgaatggctgtgatttcacttcgtcttcggtcatgtagaccgaggtgctgctcttgaccacattcccggccgcgtcaatgacgctgctacccagcagccgcccttcattcagcgcgtactgcgagccatagcggtaggccgtgcgggttccgtcgggatttgagatcgtgacctgcttttccttcttgcaggtcgtgcaggggtagatggctgcaccgcccacgccgccccagagcggctcgtagccgctgccatagtcatagctccactgcagcaccttcggcaggcccggtccccagatcttcttggctctcagcgagactacgtcgtagaaaaacggggtgacgatttcgtagtagtacgccgactgtgcgatccggcggatgcactcgctggcatggacgccactgcggtactggcgaccattcgaaaactggaactcacccatcgcaccggacggatgcttgatggtcatgaccagcgtaccgtcacgctccggcggctgctcctgacaggtctcgttgctgttgccgtcccagttcaccttctcccaggcgcgcagcgcgctggagtaggcgtaggaccaagtgcttccatcgggctgggtaactgcggtgaggcggttctggccttcgacctgaccgtagccatagttccaggtacggcccgcggcagtcaccgacaccagaagcgtgccgctgtaggccagcgtgatctcgcggccatcgctggaccagatccgggtcgggtgaccgttaccgttgtactcgtactgtacccagttgcccgaccggtcctctacacggctggccatgaggtagatgcgcgtgcgagcgatcttggtcctgtctccttcgccgcccgagcgctccagcgtgccgccaaagcgcgtgaacgcggtatcgaagaagtacgactcgcccgaggtggtcctgacccgatagccctcgccagccagacccgacttcattggaatacagtcgatggcatcgcgatgcgaggtgctccacttgcgtgcaacgccgtctgtcggcatcggcgtgttgttccaggcccccaacatggtgcgatcaccaccacccgggacatggatcatgttgccctgccagacttcgttgagccggaaggaaatgggccactgaggcaccatgtcgccactgcaacgattgttcagccaggcgctcgcgccggggaacatgccggtgatgtacggcgtgtcgacctcccagccgcccacaccatcgagactggcgttgaagctgccactcccgaccaggtccatctcgacactgaaccggcgccgcatctgcaccggcagggcgttgttgcctggcaggctgacgtcggtgacggcaaactcagtcttgccgttgtagaggctgacgctctcgccgaaaagatcatccttcagcgccgtcaggttctgggcggactcaatgagcttgcggtattcctggtagggctcgactgccgagaccgaacctgcgaccacgcacagcgtcagtgccgtagcaacacggcactgccaagcagcaactcgcttcacaattttcccctcgcgtccgcatgcgtagccgcgccaggacggcgcgacgttgcttccatgcgactctctcgttcctgattctaggcgagcgctgcgaacagatggaaggggtcgtcaacggcaatcatctggcacttgcacgcgaccattgaattgcttaatgcacccacgcatggcgtggatctaccggtacgcctgcacctgcttcctcagcagatgcggcacgatcagccgatgcacgggtgcaaccggcagcatgtacacgcgcccgaacgcgttgtgcgtatggaccaccgtcgccacttccagcacatcgccctgccactgcagggccagctgcacacgcaggtggcggtcgtcgtcttccagcacgatggcatcgtcatccagcgactgcagggtgaagatgcccagccgttgccccggacgcggctgcgcgatgtcctgtaccgcacgcaacgagcccaggtgcttcatgccgagcaggcgcatgccgcgattgcgcagtgccatcagcccatcgaaccagccgggaatggtcgccgccatgtcgcgataggcctgcaaggccgagcgcccatcacgacgggtcgtcgcctggcaggcgtgcacgaagtcggcgccagccagctgtgggcgcaggatgctgcctgcactcggcgggccggtcaccacctgcgtacggctcacggcttcggcccctgcccctcgttgtcttcccaatgcaggatgcggcgggtgacgaagcggtagaccggcttgccggtggcgaaccacagctcgcgcacccaggaggtgcgcttgagcacccgcttttccaccggggtgagcgactcgcggcagtacatgcgcttgtgcttgagcaggtggcgcaggtcctcacgggccagcaggcgcatccagcgcgagcgcgggttgccgatcaccgccagctggaagtcgatcagcgccgggcggccatcgtcggtgaccagccagttggcttccttggccagatcgttgtgggccacgccattgcgatgcagctgctgcagcaggcgacgcgcggcgcggaaccaggccaggtcaccgcgaggcggacgctggtacatggcgtcgccggccatgaagctgcggtcgagatgacgtccatcccacgccagcagctgcggcacatcggccatgccgtggatgtggcgcagtgcgcgtgcttcacggcgggccagccaccaggccggcagccgcaaccacagtggtgtggcgcccagatcacggcgtacaaaggagccggccggcccttccacaaggaggatgcgaccgaagctgtcggccttcagggcgtgcgagggcgtgtctgacgaatgcggcatgtgcccattctaggcgatggcgcccgttgcaaacggtcaccaagcggctgggaaccagtcaccttcacgcccctataatcgggcaatggactcttcatggatcgacgccaccctcgcgtggattgccgctcaccccgtgctggcgggtgccgttatcttcctcatcgccttctgcgatgcggtgatcattctcggcgccatcgtgccggccctgccgctgctgttcgcggtgggcgtgttcatcgggctgggccagatctccgggccgtatgcggtggcggcagccgcactgggcgcattcgccggtgatggcatcagttactggatcgggcgccgctggggtgaccgcctgcgtggcgtgtggcccttcagccgttacccgcagctgctcgaccgcggcgaaaacctgttccgccgcaatgccttcaagagcatcctggtagcacgctacgtgggcgcgatccggccgttcgtgccggccatcgccggcatgatgaaaatgccggccagccgctacatgcaggccagtggcatcgccagcatttcgtgggcggtgctgttcctggcaccgggctgggtgctcggcgaggcctacgacgcggtggccgccgtcgcagggcgcctggtggtggtggtcggcctgctggcagtgatcctcggcctggtctgggccatcgtgctgtacggctaccgctggtcggccgcgcgcatggacaactggctggcgcggctgctggactggtccaaccgacacccgacgctgggccgctacaccgtcggtgtgctggacccgaagcgccgcgagtcggtgccgctggcgatgctggcgctgatgctgctggtgctgggctggggctggttcgcgctgctgaccgtgatggtcgcccatggcgagccgctggcgatcgacctgctggtgcaccaggccatgctggcgctgcgcaacccgctggccgattacccgatggccgcgctggcatcgctgggcgcctggcaggtgttgttgccggccaccgctgcagcgatgggctacctgatctggcgccgccgctggatggcagccgcgcactggctggccgcgcttgccttcggcctggcgttgaccatgctgctcggcgcaacggtggatgtggtgcgaccggtcgatgccagcagtggctttggcttcccgtcggtgtcggtgaccatggccaccatcaccttcggcttcttcgcggtgctgatcgcccgcgagatgcctggccgcacccgtgtctggccgtacctggtgtcgggcatcgtggtcagcctgatcggcttctcgcgcctgtacctgggcgcgcactggctgagcgatgtgatcggcggcatgctgttcggcacgttctggctgctggtgctgggcatcgcctaccgccgccgcttcaaccgctcgttctgggtgaagccggtggcgtggctgttctacggtgtcttcgccgtggcggcgatgtggtacgcgccgcgccacattccggtgaagctggaacgcttcgagccgaccctgccggcggcgcaggcgatggacatgcaggcctggtggcagcacgactgggcgacactgccggcgcgccgcaacgagttcgacgacgaccagcgctggccgctggacgtgcaggtggcgggcccgctggccccgctgcaggcgcagctggaagcacgcggctggaagcggcaggaacaggccggctggcaggaggcgctgctgatgctggacaagaacacgggtgccgacgaactgccggtgctgccagccacgctggacacgcgcgtggaagcgctgttgatggtgcgcccgggtacacaccgcgatgagcgctacgtactgcgcctgtggccagcccctgcgcagttgcaaccgggcaatacgccgctatggctgggcagtgcgcagaccctgcgctacgagcgtcatttcgagtggatcggcatgtggcacccgctgcgtggcgtcgacccggcgctcaacgcagtgaaggacgccgtgcaggacctgccgcagcgcgaggacgtgcacagcgaaaccgggttgccggtgctgcggttgaagaccacggcgccctgaccggcaccggtgcgcgatcacccactgtagagccgagcccatgctcggctgctcttcgcgggaaccatcaagccgagcataggctcggctctacagtagatccacgccgtgcgtggatggcattccacgcatgccccagcgtgtgcaccaaggtgcacacccacccatggcaggctgctacggcatccagcccagcaactgctgcaatcgctggtgcgggtcgtccatctgcagcagctgcaggcgctgctgctcgctcagcggcaacagctcggccagccgccagccgacccagctggcctggtccagcaacgccgggttggacggcgcataagcctcgccggcctgttcgatgatgtgccccagcaccgtggccagcagcgcgtgctgtggtcgcagttcgtcgtccgggtcttcctcgcaccagcgcacgtcggccaccaccaggccgttgtcgcgcacgcgggtacgctccacatggaaacggcgggtgccgcgcaggcgaagctgcagcacgccatcggcaccgacatcgaagtcttcgatgcgcacctgcacgccgtaggccgctggcgtcgccggtgcgccgacttcctcgccatcaaggatcaggcagacaccgaacccctcaccactgcggccgctgtcgcggaccaggtccagatagcggcgctcgaaaacacgcaggcccaccgccgcacccggcaacagcgtggtgtgcagcggaaacagcggcagcgggctgtcgacgctcatcgggcctgcaacgcggcgaggaagcggcgcggggcgccgtcgaagccaccgttggacatgaacaccacgtggtcgccgctacgcacgctggactgcagctgcgccagcaatgcgtcggtatccggcaccgcgtgggcgtcaccacgtaccgcagcgatcaccgcagcggcatcccaggccagttccgggcgatgcaggaacaccacttcatcagccagcgccagcgacggtgccagtgcctgcgcatgtgcgcccaaccgcatcgagttgctgcgcggttccatcgcaaccacgatgcgcgcatcgccgaccctggcacgcaggccttccagcgtggtggcgatcgcggtggggtgatgggcgaaatcatcgtagacggtgatgccgccatggctgccgatcacttccatgcggcgcttgacgctgcggaagcgcgccagcgccgggatcaccgtggccggcgccacgcccactgcatgcgcagcggccagcgcggccagcccgttgagcacgttgtggcggcccagcagcgaccactgcacgtcgcccagcgcctgcccacgatggtgcacgcggaacgcgctgccatcggcggccagcagctcggcatgccactccagcgacggatcgaaaccaaaccgctcgaccggggtccagcagcccatcgccagcacttcggccaggcgctgatcctcgccgttgacgatcagccgcccacgtgcgggcacggtacgcaccaggtggtggaactggcgctggatcgccgccacgtccgggaagatgtcggcgtggtcgtattcaagattgttgaggatggccaccagcggccggtagtgcacgaacttgctgcgcttgtcgaagaaggccgtgtcgtactcatcggcttcgaccacgaactcgcggccctggcccaggcgcgcggagactccgaaatcctcggcgacgccgccgatcaggaagccgggcgagcgccctgcactttccagcagccaggtgaggatggtggtggtggtggtcttgccatgggtaccggccacggccagcgtgtcgcggcccggcagcacctgctcggacagccactgcgcgccggatatatagcgctggccggcatcgagcacggcttccacggcggcattgccgcgcgacagcgcgttgccgatcaccacctcgtcggtgccggccggcacgctgtcggcacggtagccctggtccagggtgatgcccagctgttcgagctgggtcgacatcggcgggtagatggcctggtcgctgccgctgacggaatgcccgagttcccgcgccagggcggccacgccgcccatgaaggtgccggcaattgcaaggatatgtacgctgctcatgaccgaggattgtgaccgatgacggctgtatagggccaatgtccgctatcgggtaagacaacccctacacgggatgtgagaaaactccaatcagctgtcagggaattcccgatagcgatgttctgtgaacccggacacaattcgaactgccagccgcagtacccgaaccggtcctactccccaagaggccatccccaagggagctcatgctgcggggccctgagcaagcccttcgctggcgcctgtcaaacgacacaggcctgatcctcgcggaccaggcctgtgtttttttgcgcccggggagccggcaattcgcgccggcccggccggatcaggccttgattgccgccaggatgcgggcttcgatctcgtccagctcaccgacgccatcgacgcgggccagggtgccacggccggcgtagaaatcgaccaccggggcggtctgctcgttgtagacctgcaggcgctggcgcaccgcttccggattgtcgtcggcgcggccctgctccttggcacgaccggcgatgcgatccaccagcagctcggtggccacgtccagctgcaccacggcgtccagcggctggccgatcttggccagcaggccgtccatcgcattggcctgggccacgttgcgcgggtagccatcgaggatgaagcccttggcgacatcagcctgggtcaggcgcgactccagcatgcccagcaggatgtcgtccgacaccaggttgccggcatccatcaccgtcttggcctgcttgcccagctcggtgccggcggcgatttccgcgcgcagcatgtcaccggtcgaaatgtgggcgatgcccagcttttccttcaggcgcgtcgcctgtgtccccttgcccgaaccgggcggtcccaacagaaccaatcgcatttgacctgactccaacgtgttgaaaacaaagaaggttcgcgtcccggacggtccggtatcgctgcaccgcaatagcgccactttaccgcatccgggtaatgtccctgcaatgtcccctcccccgagcaggtagaagcatgcgcaacggtactctcctttatgcccagtccggcggtgtcaccgccgtcatcaacgccacggcggcggcggtgatcgagcaggcgcgggccaagggcatcaaggtcctggccgcccgcaacggcatcctcggcgccctgcgcgaggagctgatcgacaccagcaaggagagtgccgcggccatccgcgcgctggcccataccccgggcggtgccttcggctcgtgccgggtcaagctgaaatcgctggacgccgaccgcgcccgctacgaccgcctgctggaggtgctgcgcgcgcacgacgtgcgctggttcctctacaacggcggcaacgactcggccgataccgcgctgaaggtctcgcagctggccaaggcctccggctacgacctgacctgcattggcgtgcccaagaccatcgacaacgatctggcggtgaccgacacctgccccggcttcggctcggcggccaagtacaccgccgtctcggtgcgcgaggcggcgctggacgttgcggcgatggccgagacctccacccgcgtcttcatctacgaggcgatgggccgccacgccggctggctggccgcggccgccggcctggctggcaacggtgatgacgaagcaccgcacatcatcctgctgcccgagcgcgcctacgacgaggccgcattcctggccaaggtgaaggccgtggtcgagcgcgtcggctactgcgtggtggtggcgtcggaaggtatcgcgaccgccgatggccgcttcgtcgccgacgcaggcggcggcaaggactcgttcggtcactcgcagctgggcggcgtggccgcgcaccttgctgcacgggtcaaggaccagctgggcctgaaggtgcactgggcgctgccggactacctgcagcgctcggcccgccacctggccagcaggaccgactgggagcaggcacaggcggtcggcaaggccgccgtgcagctggcactgaagggccagaacggcgtgatgccggtgatcgtgcgcagcagcgatgcgccctatcgctggaagatcgaagcggccccgctgtcgaagatcgccaaccacgaaaagaagatgccggccggcttcatccgccgcgatggcttcggcatcaccgccaaggcgcgcgcctacctgtcgccgctgatcaagggcgaagcgccgcttccctatggcaccgacggcctgccgaagtacgtcactctgaagaacgtggcggtgaagcagaagctgccggccttcgagggctgacctgaaaaaggggacggaggggattaagtcgcatacgcccctctgtcatctccaacagcatcagcagtgggtcggatacgacttaatcccctccgtccccttttcatggaggtcatcatggcactgcgtgttgttcgtctcggcagcccgcgccaacccggtgagggtctgcgcatcggcaccgtgcggcgaccaccacgcggcgtgccccgcagcgaattcgcgaaacgggactggtacgacgtctggttcccgactctgtcacccagcgcggagctggtgaaacaggcccatgaggcgaagaccgccgccgactggactgcgttcttccgccactacaaggccgagatgaaagcgcccgatgccgcgcacgcgctggacctgctggccgcgatgtcgcagcacagcgacctcagcgtgggctgctactgcgaggacgaagcgcactgccatcgcagggcgttgcgcgagctgctggtggcgcgcggggcgacgctggcggagtgagatcagccggatgccggccagcggccggcactaccacgtggacgactgcgtgggcgcagcgcacgcatcatctcaattgcaggcctttccttccatctgcagctgcgcggcgaacatcgtcacctgtggaatctggccggctgccgcctgcttcttggcctcttccagatagatgcgcgactggccctgcccatccagctcgaccttgttgctcgacggcaggcgccacacccgcaccaccgcctgctgcgccgggcatgccgcgttgggcacgcggatcacatcgttgagcttccagcccttgtcggcactcggctgtgccttggtgtagtcgacgaagcgcgcacgtggctggcactgctcgctggtacgcacggcggagaagcggtacggggcggcggcatcgccggtgaacgcaccttccaggcgtgcgcaggcctcgggaatctgccgcagcgtatgcaccgcgcccaccgcctggggtgcgcccacggcacgctgcagctccggggtttccgcagcgagtgccggcacggccggggccagggcggcgagcatcaacagggacaggcgcatgggggatctccatcgggactccgcgcaggcttgcagaggctggcttaacggggtgcaaaggccggtggctcgcaaatcatgcccttgcctggcggcgggtccgcgcgcatgtcgacgcgctcattggcagggcgcccacgggtcatgcggcgcggctcccacgggccagtcgagcatggctcgactctacaaagagcggcacgcatactgcaggcaccagggaatgctgaacaccgccatacgtcggacgaccaccaaggtcggtacgggttggttccaggctgcagcccgtcgtccccctcgtggtgccgttcatcgccactggatgcctacatccattctgcggaggggtctaatgctggaacgtcacgggctgtcactggcgctgggctgcgccattctcgcgatcctgttcggaatcgtctcggcgcgctggatcctgcgccaacccaccggcaatgagcgcatggttgcgatcgccaccgcgatccaggaaggtgcgcgtgcctacctcaaccgtcagtacctgaccatcggcatcgccggcgtggtgctgttcgtgctggtcggggtgttcctcagctggtacaccgcgattggtttcgcggtcggtgcggtgctgtccggcgccgccggctacatcggcatgaacgtgtcggtgcgcgccaacgtgcgcaccgcggaggcggcgcgccagggcatcagcgcggcgatggacgtcgccttccgcggcggcgcgatcaccggcatgctggtggtcgggctgggcctgctgggcgtggcaggctactacgcactgctgctgcgcatgggcctgccgatggagcaggcgctgcacgcgctggtcgggctggcgttcggttcgtcgctgatctcgatcttcgcgcggttgggcggcggcatcttcaccaaaggagccgacgtcggcgccgacctggtcggcaaggtcgaagccggtattcccgaagatgatccgcgcaacccggcggtgatcgccgacaacgtcggtgacaacgtcggtgactgcgccggcatggccgccgacctgttcgagacctacgcggtgaccgtgatcgccaccatgctgctgggcagcctgatgctggccgaggccggcgccaacgcggtgctctacccgctggtgctgggcggcgtatcgatcatcgcctcgatcatcggtgcgctgttcgtcaaggtgaagccgggcggctcgatcatgggtgcgctgtacaagggcgtgatcgtctccggcgtgctggcggcgattgcgttctatccgatcaccaccgggctgatgtccgacaacgtgcatgggccgatggcgctgtatggctgcgcgttgatcgggttggtgctgaccgggctgatcgtgtggatcaccgagtactacaccggcacccagtacaagccggtgcagcacgtggcgcaggcctcgaccaccggccatggcaccaacatcatcgccggcctaggcatttcgatgaagtccaccgcgctgccggtggtggcggtgtgtgcggcgatctggggagccttcgcgctgggcggcctgtacggcatcgccatcgccgctactgcgatgctgtcgatggccggcatgattgtcgccctcgatgcctacggcccgatcaccgacaacgccggtggcatcgccgaaatggccgagctgccctcggagatccgcgacatcaccgatccgctggatgcagtgggcaacaccaccaaggcagtgaccaagggctatgcgatcggatcggcggcgctggccgcactggtgctgttcgccgactacacccacaacctgcaggcggccaatcccggccaggagttccgcttcgatctcagcgaccacacggtgatcatcggcctgctgatcggcggcctgattccctacctgttcggtgcgatggcgatggaagcggtcggccgcgccgccggtgcggtggtggaggaagtgcgccgccagttccgcgagatccccggcatcatgcagggcaccggcaagccccagtacgacagggcggtggacatgctgacccgctcggcgatccgcgaaatgatcgtgccgtcattgctgccggtggcggtgccggtggtggtcggcttgctgctggggccacgcgcgctgggcggcctgctgatcggcaccatcgtgaccggcctgttcgtggccatttcgatgaccaccggcggcggtgcctgggacaacgccaagaagtacatcgaggatggccacttcggcggcaagggcagcgaggcacacaaggcggcagtgaccggcgacaccgtcggcgatccgtacaaggacaccgccggcccggcgatcaatccgctgatcaagatcatcaacatcgtggcgctgctgctggtgccgctgttgtagatccgcgccatgcgtggatgacggcctcgatggggtcagagccctttcctgcggaaagggatccgaccccaccgtcaatcaccgcccacgcaggaagaacgacaccggcaccatcacttccaccgggtcgccggccatttcggccggcggcgccggcagcgggctggcccgctgcacggtgtccagcgtctcctggtcgagcaacgcgaagccgctgctgcggcccagcaccaccgccgaaaccacaccgtcgcgggccacggcaaagcgcacgtagaccacgccctgctggcgcagccgctcggcctggcgtggatagcgccggtgcttctgcaggtgcccgagcaggcgtccttcccaggtcgcctcggcacgactgcgctcacccgccgtggtctgcggcgcggtgtagcgtgcggcagcgtcggcggccacctgcggcggtgcgctggtctgcgcgacgttggcatcggcgctgtccggcgcgggcgctggttccggcgcttctggcggaggcagctcaccctgcggctgcacgggtgccttgggttgctcacgcacggctggcgctggcgcctgctgccgctgctgttgctgctgcagcggcccggtggcgacctcgcgcggcggcgccggcggtgcctgcgccatcggcgccagctccagcgtcagcgctgccgggggagccgttgcagcctgcaccggtgcgcgcgccacccaccagcaggccgcgccgatcaacagcgcgtgcaccagcagtacgatcgccaggctggtcgcccagcgccgcagtccgctcattgcgtgcgctgctccaggccgaccagtgccaccttcaggtaaccggccgcacgcaatgcatccagcgtggccatcagttcgccgtagggcacgtgggtatcggcgcgaaggaagatacgctgcgcggtgtcactgtgagtggccgcctgcaatgcagccgccagcccgtcgcgcgctacggcctgttcgccaacgcgaagcgacagatcggcctgcacagtcacatacaccggcgcctgttcgggcggcgtgtcactggcgctgctggccggcagctgcaccggcaccgacacggtcgccagcggtgcggccaccatgaagatgatcaacagcaccagcatcacgtcgatgaagggcgtgacattgatctcgtgcgcttcttcgggggcatcgtcgcggtcggacgcggtcctgatcgccatcgtcgcgcctcagtgcaccgcgcgcagcggcgccgcagcggcacgcgggacggcacgatcaagatcgcgcgacaccagctgctgcacggcggccgacagatcgccgagcagcccccgcaggccggccagcacgcggctgaaatggttgtagaccagcaccgcgggaatcgccgcgaccaggccgagcgctgtcgccaacagggcctcggcgatgccgggcgcaaccaccgccaggctggtggtgttgctgtgggcgatgccgatgaaactgttcatgatgccccacaccgtaccgaacaggccgacgaacggcgccaccgcgccgatgctggcgagcgcgccgataccgcgccgctgcacgcgcgcggtttccagctcgatgcgctccaggcgcgaggcgacgcgctccttgatgccgtcgtggctgtccagctcctgcgacaggcgcagttcggtgcgtgcagcatccagcatcgtcagtgcggcgccctgttgcagggtcgcttcctcgctctgcgtcggcagctgtgcggactgcagcaacagcgcgcgtgccgcacgcagctgccgggcctgccgcgccagctcccagcccttggccagcagcacggtccaggtggccagcgacgccagtgccagcgcgatcatcacggccttcaccaccacgtcggcggccaggtacatgccccacggggtcaatgcgggggcggccacaggggccaggtcagcaggcagcatcgtctcggtttccatcagcatcaggggtcgctgcgcgacggcgggtcgcacgcggatcattggcgtcgtccacttccacgaccggatggggctgcagccgcggcgcgggtcggctgagcacgtagccggcgctgaccgcgaagaacaggcccacgcccagcagcaggcgccacgacgggtgcgctccccagcagaacagcgcaaaacccacggccatgccggcactggcgaacgccttgcccttgcgcgacaccgcaccctgctcacgccacagccgcagtgacgggccgtagcgcggatgcgccagcaggcgctgctcgaacttcggcgagctgcgtgcgaagcagcccacggcgaggatcaggaagatggtggtcggcatcaccggcagcaacgcgccgatcaccccgaggacgaccatcaaccaccccagcgcgaaccagagccaacgcatcagcgctgcatccgcaggcgggcaccaggcatcaggcgaattccacttcgacgtggccgtgcacgctgcggaacgcggcgtcggccgcatcgatcacctgctgctcctgcctggcactcagcggtaccgcgtccagcgcagcggtgaactcgcgccagtggcgcgccgcgccatccggatgcgcggccaggtggcgggcgccgaaatcacgatccaggccgagcctggcggccatcttgtacagaatggtgccgccgaggttggacccttcggccacatacagccaccccaacgcggcgggcagttccagatcggacggcaacgccgcgatgtcggccccgggcagcgtctgctccagatcctgcaggtcgcgcgccacctgggccaggcggcggcgctcgcccaggtccggcagcagtgcgtccagcgcagggttggcatacagcgcatcgatgctgcgatggaagcggtactgcacgcgcaggaaccgggcgaagttgctgcggtcggcgaagatgtcaccggccatgatgcgcttgtccagggcgccatggctgtcgcgggtggcggccttgagccgcaggctgcggctgtcttcaggggcggtgtgtgcgttcatgggggatgccaagggggtcgtcctgctgtagacgttcgccacggggctttccccaaggctatgtgcgccgataatggcgcatcccttcttaccgcaggaaccgacgatgatcaccaccgaaccgcgcatgaccaacctgttcctgcagctgggcctggacgccagcgccgagggcatcgcccgcttcatccgcgagcaccagctggccaccgatgtggaagtggtcgaggcgccgtactggaacgatgcgcagcgccagttcctgtccgagtcgctgcaggccgatgcggcatggaccaccgtggtggatgagctgaacgagtcgctgcacgaggacgcggtgaaggcggcgacggggctgtaagcggggtatcccgcgctgttggggtcagagccctttccgcaggaaagggatccgaccccgccgctcgccctttccgcaggaaagggatccgaccccagcgctcatccgcgaccgatcagtacttccaggtcagcgccagccgcgcggtgcggcccggtgccggcatcacgcccagggccagcgggtccaggtagtagcggtcggtcaggttgtccacgccggcttccaccgagagctggtcgttgaagctccagctggcgaacaggtccaccagcgtggttggccggtacagctgctggatcgccgacaggcccacgttccagtccttgtccagcttgctgatcgggccggcgttgtggaccacgcgggtgccgaaggtcaggcgctcctcgaacaggcgcgagcccagggtcaggttgaccatgtagcgcggcgggttctgggtattggtgtacgagccctcgaagccgccgtccacgcagtcgggcgtgttggccagctcgccgttcctgcgctgcgccccataggcacggcgctcggcggcgatgtccggcgcgcaggtcttggccttgaagtagtagtgcgcggacagatcggcaaataccttgccgctgtcatagctggactggaactccatgcccgagaccttgaactggtcgacgttgcggatcaggcccgccgacagcgtgcggtagtcacgggtgatcaggtcgtcgatacgggtatcgaaatacgccagcttcagcgccaggcggtcgccggcagtgaacaggtcgtagcggagggtgctggcgccgatttcccagctgcgcgcgcgctccggcttaagctcgcccaccggcttggcggcggtgaacaggcccagcgtggtctcgaacaggctcggcagcttggtgccttcggcgtacttcacgtagaccatggtgtcttcgctgaagcgataggccacgctggcggtcggcgagaacgcgctgtcgcggcggcggatcggctgcgaccagttccagctgaccggcacttccagatcctgcgccttgccagcgtcgtagaagttccagccaccgatgtcggccaccgtgcccttcttgtacggcgaggccagcagcgattcccgggtgaagttgccgttggcatccgggtaccagttcagcagcgcgatgcgcttggcccgccacgacggcagcgccgggttgccattgagcagttcggtatagcggtactggccctgcacctcataggcatcgggcgtggccaggcggttgcggtcatgcacatccacgcggttccagcggccgccggccagcagttcccaatgctcatcgggctgccacttcagcgaggccacggcgctgtactccttgcgctcggcgttgcgcaggaaacggttgttgaccaggtcgtcgtgcatgaccggccccgaactgcccggcgcgatgtcttcgtcgctgtaggacagtccgtagtcgagggtgaacgcaccagcgcgggtgtcgaacctggaggtattactggcatccaggccgaagcgtttgtgccgcagcggattgcggtaggcatccttgtagccggggtcaccgctgaagctgggcgcgtcataccactcggtgcggcggtcgaagtaccacggggtgatgccggtcaggctgttgtacatcacgctgtcggtgtcggtgtacgcggcgttgacgcgcaggtcgatcagctcgctgtccggattgaagcggtagcgcaggctgtagctgtccatgtcgacgtggcccggatcccactgtggaatgcggtcacgatccacgcggatgatctgcgaggccatgatctcgccggcagtgccttcatagcggcgatagccggcttccagcgtctgcgtgtcgtcgatgcgccaggtgcccttgagcagcgccgacttcgagcgcgaagaggtattgaaaacctcggtgcgcggcggattcagcggcgccagcgtgcgccgatcctgcgggaagtcgtcgtagccatggcggccggagaagtagttgccgttgtcacggtaggcgtaagcggcgaccagatcgaagcggtcccagtgccctgcggcggccacgttgaagaactggctgccggtggcgctgcgatcggtgcgcggtgccgcactgtaggacggcaggctgttggcactgccattggccaggccgccgcgcacgcgcacgccgacgtcgcggccctcgcgcagcacgtcaccgatcttcaacgtctccatctcgaccacgccgccgatgccaccggacgcgttggcctgcaggctcgggcccttggtgatggtcaggctggagatcaggtccgggtcgaggtaggtgcgctgcgactggccggcgtagccacggtaggtatccatgctggactggccaccgtcgatgatcaccggcacgcggccctggccctggataccgcggatgttgacgtcgaagccgttgcccacgcgcggatcaccggcggtgacaccggccacacccttgacgatgtcgccgttggaggtgccgcggaaacgctccagatgcgtgcgattgagcgtggtggtcgaacccacgctgcgatagctgtcgagcaggcgtgcttcatcactggtcgcgccgctcccgacgcggtcgccggccacactcagcgtgtcggtgacgatcacaccactgtcggtctgcaacggcgttgccgcttccagggtgaccgcatcggcgctgacccggcgcactgccaggccactgccctgcagcagctgctgcagcgcctcgttggccgacaggctgccgccgaccgcgcgagaggttacgccgcgtgccagcgatgcgggatagaccacctgcacaccggactggcgcatgtagctgcgcagcgcgtcatccagcggttgcgccggaatatcgaagcgcagcacggccgcgtggtcgctgctggcgctctgcgccagtacggacggcgcggcactggccaggccggcggcgagcaacgcgatgcacaggcgggacgggcgcagcacgcggcccgggcgatggaagtcgaacatgggggaacctgtcaggtaatcggtgccgcgaacgcggcgtcatccgcaacacgggcggacacggcgacgtacgtggcggcggcgggtacgttcgcggagtaagacggatgaaagcgtggcaaccccaaggggatttgcagtcgaagcaggtgccgacggttgcgcgcccggttgcagtggtgggcgccgacggttgcgtggctggttgcagtggtgggtgccgaccgttggtcggcaccggggcaatggcgtggatctaccgatggacgatggcgacgccgagcggcagccgggtcacctgcaatccagccgtcgcggccagcgcatccagcgcctgttccgggcggtcgatacgcaacgccgcgcttaccgccggcagctgcgatagatcaccacgcacgaaggttgggccagcgcgatagcgccccacccattgcaccgcgtcagcaacgcgggcctgttccaacagcagctcgccctgacgccaggcgccgacgctgtcggccgcaacgtcccccaatcgcctcaccccactgtgttcaccgtaggccgcgcgctggccctgctgcaggtaggtccagccaccgtcaaccgggctggccatccgtaccctgccctgcccgacctgggtttccacctggtcgtggccccgcgccacggtgaaggcggtcgagatgtcctcgaccacgccattgccggcgcgcacgctgaaacgtcgctgcgcgtccggactgacctcgaaccaggcacgcccgcgcaacagctcgacctggcgggcgttcgcatcaaagtgcacggcaatcgcactgtcggcgtccagcaccgcacggctgccatcaggcagcagcacgttctgcacctggtgcgtgctgcggtgatcggactgcaggcgcagccacgcctccggccatgccaccagcatcgccagcattgccgccgcagccatggcccaacgccgtcggcgcgggcgtcgatcagccacgcgggccggctgcgctcgcggcccgacgctgcgccacagcgcgcgctcgtgttcgaaggccctgcggtgccccggctgttgcagccagtgttcgaacgcctgcatgcgcgcgtcgctgatatcgcccgaggccagccacgcgatccagtcccgggcctgctcggccagggcatcgtcattggcggcaggcagcatgttcggcgggctcatcggctggcggacaggcgcattcaagcgcggggcggagaaactgggccgcatccacggtccaatgatcaagacgtttgcgcgaaggccagccccaaggcggcgcgatcatcggccgctgcgggcccaggccaggcgctgcagcgcggtgcgtacgtgattctccaccgtggtcaccgataccccaaggcggcgtgcgatctcggcctgggtcaggccctgaaggcggttgagccggaagatggtgcgggtcggctccggcagatggccggccgcgtcgagtacccgctgcagctcgtcctgcgccatggcctgctcttcggtggagatcacctcgtccggcccccacaggtagtgatcggccaacaggcggttgcgccgggtcgactcgcggccgtggtcggtggccaggttggcggccagccggtacagataggcgcgtgggttgtcgatggcctggctgtcatcgaccccacgggccttgaaccacaccgcctggatcacgtcctcggcgccgttgtcgccccccagtatccgttgcacccggcgcagcagcgctggccgctcgcggatcagcagttcggtgagggaggcagcattggaggacatgcgcggagccgggacgacagacgggaggcgccgcgcatgctactccgcaaatgcgaatcagtcacgtttgcattgtcgaaatggtcacaggcaatcagtcagcccctcgtaaacgtgggtgctggttccgggcagggtggcatgcagggcgtcatgcccggcgcgctcccacgctgccagcagctcgtccaagcgggttcccgccgccagtggcagcatgcaggcatagcgtccctggtcaacatcgatctgcccggtcttctggacccaggtgtagctcccggcgaacgtccagacacaacgggtcacaacaccggtggcccgctgcactgagcaacgcaagcgcatcgcccgcaggttgtaatactgcccttcgcagaaggtatccccacagatatcgtcaaagccgcgcaccaacagacgttcggccgccaggaagcgctcgcgcccggttgccggattcgggtagtcacgggcatcgacaaattgaggggtcgcctgggcgttggctgccatcagcagcgcgcagaccagccatcgtgccgggaagacgcgcatcaccccgccctcccggtcttccggaggcagtccggcagcgcatcgaacaggccatggtcaagtccaggcaggttcgccgtcaggccatctggtgcttccagtgaagcatggaaggcgtcaacaggtacccctggccccaactccaacggacagacccagcggccattgtcgacctgcacctccccggtatcggcctgcacggccagctcgctggccaccaccacccaggcgcagcgctgcaccgttccgcgatgggccagcaccgcgcagcggacctccatcacccggtagttgctgtactcaccttcgcaccaggtatcggcacagagcaggtcgaactcccttgccagggcggcctgcagcccgtaggcgcgctcccagttggcctcgggccgggggtaatcgatcaggtccacgtgcagaccgcgggcggagacaggcagggacgccagcaacagcacgccccccatgcatcgggcataccaggacatcggcggaactcctcgggaatgagcgtccagcctgcgccggcctgccctcctggcccatcggccaagggcggcgccccccgtcaggccttgccgcgtcggcaggtcggccacccgcccgctgcacagcgcccggcaaaggcataaaatggtgagctatccgtctatatccccccacctggagcacaccatgggtctggaactcgtctcgcccggcaagaacccgccggaagaaatcaacgtcatcatcgagatcccgaaggactcggagccggtgaagtacgaagtggacaaggaaaccggcgcgatcttcgtcgaccgcatcctctccaccccgatgcgctacccgtgcaactacggctacgtgccgagcacgctgtgtggcgacggcgatccggccgacgtgctggtggtgctgccgctgccgctggtgccgggctcggtcgtgcgctgccgtccggtcggcgtgctgaagatgagcgacgaggcgggcagcgacgagaagatcctggccgtgccggtctcgaagatcttcagcggctacgcccacgtcgaagacatcgcccaggtctcgagccactggctggagcgcatcggccacttcttcgagcactacaaggacctggagaagggcaagtgggtcaagctggacggttggggcggcgccgctgaggccaagcagatcctgatcgaggcgcaccagcgccatctcgacagcaaggcctgagcctgaaccggatcgctccggcggtaccctgccggagcgatgcgggtcacgtttcatgacgacggcacatcactcttgctgccgtattaggtaaattgcgtcacttcacacgtcatcgacatccatcgtcgagacagccaggggaatgtgtcgtgcgtattctgcttgttggggatgcagccagcctgccggccgagctgaccgaattcattgccgatcttggggaagactggcagccgttgaccgccaccgatggccaggccgcgatgaccgcggtggccacgcagggcgtggacgcggtgatcgtctgcccgcaattgccggatctcaatgccaccacgctgctggggcagatccggaccttgcgcccggagaccatccgcatcgcgctggtcgatgcgcagcatggcaaccggccgccgccggcgcgcctcattggtgtcgcccaccgcttcctgccgctgccgctggcgccggaagtgctgctggaggcactgaccagcctggaagaactgcgcgaagtgctggacagcccgcgcctgcgcgatgccatcggccgtatcgagaaactgccctcgccgccgcacctgtacctgagcctgacccaggccctggaacatgacgacgacgccgacagtgccgatgtcgccaagctggtcgccgccgatccggcgatcgccgccaaggtgctgcaactgtcgaactcggccttcttcagccagggccgcaccattgccgacctgcgcaccgccgtgacccggctgggcctggccacgctgcgtgacctggtgctggccagcgaagtgttctccgcaccgacgctgtcggccgccgagcgcaactcgctgcaacagcgcgcactgctggcctcgcggctcgccgcacgcctgctgcccgaatccagtgccgaactgggagcgactgccgcgctgctggccgacatcggcctgctgctgccgggtgtgcgcaacgagcgcagcgagccctcgctggccggcgacacccgccctggccatgccgaggccggcgcctacctgctgggcctgtggggcctgccgatgccgatcatcgaagcggtggccttccacctgcagccgcagcgcgccaacacccgcagcttctgggtgaccggtgcggtgcacgtggccctggcgctggtcaatggcgatccggtggacgaggactatctgcagcgcgcaggcgtgctgaacaaactgccgcaatggcgcgaacacgccaatgcgctgatgggactggtgcccagcgacgcctgagcgcgttgcatgatgtccggatgacagagggcgcacccacaaggtgcgccctttccatgtcagcgggtaccgcaggcgtcctgcacgcagcgacggtactgcgactcgcagatgactggtgacttgccactggccaggcactgctggcggaactcctcgcagtaaagcccaccgccgcagaccccgaggccctgcgcgaacactgcgcccaccagcgttgcgtagatcaatgcagcggccgatgcctgccgcagcaacgtgttcttcatatccctctccacatgcaagcgtccggtagtggacctcctgactgtgttgattacgacacgacgggaccgtgactgcgctcaccttccaacaatttccggaattcccctacaagaaaaagggcggaccttgcggtccgccctccttctgttgctaccgcacttcgatggatcagaagcgctgggtgtacttcatgtacaggaagcgacccacgtcgaagccgccgtagtaggcgaacgccgagttcggagccgagtactgcagggcacccttgtggtcgaacacattgttcgcgcccagggcgatggtcgcatcccacggcgccttccagctgacctgcaggtcgtggaaggtgttggaaccggtgtgacgcagcggatcggtctcaccgttggccatgtggttcggagcatcgcaccagccgtcagccagcgagatgcagctttccttcatgcccgagtagtagcgcgcggtgtagttcacaccgaaatcgccgtactgccagttgacgcccaggttcgaacgcacgcggaacaggcccggctcgctgacgcggccgaccatgatgttgtcgcccgcgctgttctggcgctgctcgtcgtacttggcggtgtagctggtctgccagtcgatgctgaactgaccaatggccagttccggcaggcggtacttgatgcccagatcgtagccctgggtttccatcttgccgaggttggcggtgccgtaggtgatcgcactgacgtggccgtcagccgcacgggtcacgctcgagcagcgcgaagcgttacccagcacgtagcagtcacgcaggatgcggtcgacgctgtcagcgatgatcatgtcgctgatttcgtacttgtaccaatccagcgacacgtccaggccctgcacccaacgcgggctccacaccaggccgaaggtggtgctcttggaggtttccggcttcaggttcggattggcacccgagatgaactggtcacccgactggcacggcagggtcgaacattccttgcctgcctggcccagctgcacgtagttggccggcacgcctgcgccggagcacgcggcattgcctgcaacgctgcccggagccttcacgccgcacggatcgatgtaggactcgaagctcgagctcaggccaccgtacaggtcgctgatggtcggagcgcggaagccctcggcgtaggtgccgcggaccagcagttcatccagcggacgccaggtcaggccgaacttgctgttggtggtgccaccgaagttgctgtagtccgaataacggctggcaacgttcagggtcagttccttggcgaaggccatgtcggccagcagcggcacgttcagttcgaggtagacctcgttcagatcgtactggccgcgggtcggcttctggcccaggccggtggactggcccgactgtgcgaaggcgtccggcacgtagctgccttcttccttgcggtgctcgacacccagggcgaagcccaggtcgccggccggcagggtcacgatggcgcccgacaggttggcggtgaagctggtggtcttggtgacgccacgggtggtgaaggtcgggaacaggaagtcctgcagctcctggttcgccagcgagccctgaccctcaacgccgtacggcagcagcgggttccacggacggcaatcgcccaggatcgggttggccgcggtgccgcagcgggcaacgccaccggcatcgatgaacgacgggcccagcgcctgacgcgcgccgatcaggctcatgtcaccgcggttgctcttgatcgactcgttgcggttccacagcgcgccgacatcccagtcgaaggtcttgccacccagctcgaagaagccggtcagggtcggagcgaagcgcagggtcttcagctggctgtcagtggtacgcggcacttcccacaggcggcggcggaagctgacgtcctggccaaccgggttgaaggcgctgtctgccgacagcggggtgttgatcgacttggaagcggactggtacggatagccggcgatctgctggaacgtctggcgctcgttgtagagcacgtcggtgttcaggctgatcgaatcggtgaagtcgtaggtgccgttgatgtagaccgacttgcgcttcacaccggtcagcagggtcatctgctcgttcgagttggcgaactcgtcttcggtgatcgcgtggtagtcgttcgggttcttcggattgccacccgggttcagggtctgccacaccgcgctcgacttgctgcagtcgtacagcttcgggttgcaccagctgccgttctggctgatcgggctccaatcagccgaggtggagttcggacccagcgagccgtcacggctgtaccagcggtccttggcccacaccggatcctgcttcgagtactcggccgacagggtcaggctgccgcgctcaccgcgggcaccgagggtcatcgaataggtttcgctgtcgccgtcgcccttgccgtactggccgacgtagacattggcttcgccgccgtcgaagttcttgcgggtgatcacgttgaccacgccggcaatggcgtcggaaccgtagatcgacgaggcgccgtccttcaggatctcgatgcgctcaacggccgacatcgggatctggctcaggtcctgcagacccgaggtcgaagcgcccaggcgcttgccgttcatcagcaccagggtgcgctcggcgcccaggttgcggatgtcgacgtagtagccgcccacgttctcgcccgaagccagcgactccgaacgcgaaatggccggggaaccggccgaggtcaggttgttcagcacgtcggcgacgctcgagaagccctgcttttccagggattcgcgggtcatcgtcaggatcggctgctgggtctccaccgaggcgccgcggatgcgcgagccggtgaccgaaatgcggtccaggtcggtggtgccctttgcttcctgagccgaagcaaaggccggcgccagcgccagcgcaatgccggccggcagcaagccgaaccgcactgcgggattacgaacgttcatctatctctccaaggtacgtgttagcagcgtgttaaaacaccccagcacgttacgattgcgttgcagcgctgtatttgcgcgaaccaaccggagactttgcggattgtggcgggagcaagccgccgttctccctgaagcgcgacgcggactggccgtagcgggcgcggaacgcacgcgcgaagctgcagcagttgtcgaaaccgctggcggcagcgacctcgcccaccatcatgtcggtgtcgcgcagcagatcagcggcgcgttcgaggcgcagtcgtgccgaaagcgactgcgggctttcctcgtacaggctctggaaggtcttggagaggtaccagctggagaagttggtcagttcggccagttcgccgatgcgcaccacccggtggctgttgccttccagatagaggcgcgcacgctgcatgcggccgaacacctggcgcttgcggctgcgcgagcggcctgggcagcgctgcacgttgtcggccaggccacgctgcaggccagcaaggtgcagcagcagcggacgcatggcctgggccggctggccgctggccagcgcatcgcgccacaagcgcagcgcaacgcgggcgtcactgcggttcatgcggccacgaccggcatacaggccacagtcggccatctcggtcagcacgcgaagcgcttcaacgttcaggttcaggccaacgcacaacccgttgcgaccggcctgcaccaacggccgcgattccttttcgaaggcgatccactcgccctggcgcaggcggaatcgtccttccttggcctccacccacgaactgccacgcacctgcatccagacagtgaagctggagccggcggtctgcaggctgcccagccgggccacgcccaggcaggtcggcgtgacatcgtcgagcgaccggtccagggagacggtttggccgcgatcggccagcgagagttgacgcatgggggcaccacggatttgcctagtacaggactccgttttgcctaatcaggcggcaccgcgtcaggaaagtccgacgagatcgccacgaattcgcgacgagatccagacgaagaaattacgaaggcccatttccactgaaaaacaacaacttggagaacgccgggaacagcgcgggggggcgttcgggcaaccgcatcacaccgatgtcggcaccatcgctgaccgccatcgccacgaacaggtcacgcccgtcagcgctggcgctgagtccgttgccggcgctgagccgttccgcatccaggcagcgttccggctccgcgcggccgggcaggatgcgcacgaaggtggtgccacacgtgctcgaagtgccgaggtaaccgacgccagtgttgccggccacggtccaggcccggtatcgccagcggctgggccggtcatcgctgatctgctgcacgctgcccgacgacaacgcggcatcggccgaccacaggccaccggcggccaggcgggtgaacaacacgcggccactgctgcggtcgaagcgcgcctgcgacaccccttcgatgctggccaaccggcgccagggctgggtgctgcggtcgaacagactcaaccgggtgcgctggtcggcatcgcgctcgaccacaaacaactgctccggcgacgcgccatacagggcctgcagcggctgttcggccgggaccggcaaaggttgcaggcgttcatcgcgtggcgcgatctcgtagaccaccgtgcgcccatgcgcgtcgcggccgaccacgagcagctggcggctgtcggccgaccagtccggtgcctgccgcgcttccggccgcagcccttcaatggggcgcagcgaatccggccgctgcatgtccgcccaccacagggcgaagctgccggagcgatccgaggtgaagaccagctggcggccatcgggcgctgccatcggctgcccatcgcggccactggatgcaaacaggcgttcgggcgcgccgctgccctgcaccggcaccttgaacacgccgaactgcgcgcgccggtggacgaaggccagcatcccgccacgtcgcgacacggcgggccactgcgcatcatccaggccggcatcgcgcagcgtgtgccgctcgacgtccagataatagagccgcgcctcgctgtcgacgcggcgaccgaacacgatggtgcggccatcgtccagccaggcccatccgcgcagctctgccgcctcgttggtcaactgctcgggcgtgccgcccgcggccggcacccgccacagatcgcccagctgcggattgcgcacgaacaccagccattgcccatcgggcgagtaacgcggtgcgtagtcgaagtcgtcctggtcgacgctgtacgccagcgcgcgccactgaccactggccagatccagcacgcggatgccacggtgcgcgtagcgcccgaccatgctgccgaacaccaggccgcgaccatcgggcgtccagtcgaagctgagcagctcggtgccatcgcagcgcgtggcctggcgcagtgcgccaccggtagcgctggcgatcagcacctggcagccaccgtcggcagagaaccgtgcgaaggcaatttcgcgaccatccggcgaccagttcgggaatcgatcgacggcaccggccggcggcgccagcaactggcgcgccggcgcgttgccggaggtctgtaccttgatcgcaccaccgccgttgccatcttcgttggcgccttcataggccaccagcgaaccatccggtgacagcgtgggataggtttcaaagccgctggttgcggtgatcaaccgatagggacgctgggggctgccgatcacccgcgtgccgttctccacggcggcctccaccggcgaactgctggccggtgcgcggcgcagcagcagcgtggtcatcaccagcagcgtggccagcatcaacacgcccagcgccagcagcacgcggcggcggacatggcgccagcggcggcgcgattcctgcgcgcgcgcgggcagcaccgcagcggcggcgagtgcgggctgcacgtccacaccttcgtcgtcaggcaagcccgcagccgacggctccgcatcgtccagcgcctgtaccggtaccagaagccgatagccggtcttggcaatggtctcgatgtaggcctggccgctgtcgtcgtcgttgctgaacgccttgcgcagctgggtaacggcctgggtcagcacatcgttggtcggcagcgtgtccggccacacctcggcgaacaactcgtcgcgggtgaccacacggcccggctgccgcagcagcacgcgcagcacgcccagcgccttcggcgtcagccggcgcggacgacgcgcaccgacgacctcgacttcgcgcgaggacagagtgacgatgcactctcctatccgtatccgatcggacacgggtggctgtatttcgctgctgttcattttctgctacacagtagagacaggtcccgggcagtgtttgccttcgttacggtcccgtcctgggaacagcgaaaagccagactccgcacaaagcatcggcgcataccgcaaaaacaatcgagcgcgcgaatactagcctatgcaagttacctcgcctatcgcgtggtcgacatcaggctctctctcgccgacgcattcacataattcgcgacatcattcgcgccctcttgggcgcgaaatttttatctggcgttcattttcacatgcgccgcagcatggtcaatccgaccagccgcgaaaccaccaaagccacgtacatcacgccggaaaactgctccagcatgaccagtgctcgtgcctgtggatgaagcggcacgacatcactcaagccgactccagacagcaagctgaagctgagataaagcagctccatccaactgcgctgcgcctgcccgccggtgccctggaaactgcccggataccactgctggcacaccgcgaacgcgaaggcgaacgcccacgccagcagggtgaaggttgcgccagccgcgaacagttcgtcgcgggtgaccttgtggtcctggagcatgtaggcaatcagggcgccagccgtgtagaagtacagcaggctctccagcacctgcgcggtggtcagcaatgcggtgcgctcgagcaatgcacctgccaacgagaacaccaccgagggaatggccagcaacagcgccagccaggtgcccagcgggctgcgctggaccacccacagcgccaggccgagtaccgccatgccgaacatgcccagtgccgcgcggccggcggcggtgtcatccagcgcgggatacagcagcaccgccagcagctgcgcgcccagcaaccaggccgaaggatgccggcgggcaatggccagccaacgggtggtcatggcaacaggcatggtgtcctttccccgggatgatgggcggaggatagccgggagcggcgtgatgagcggtagtgccggccgcgggccggcaccaccgtctgcgcatcacccctggtggtagacctcggcacccgcggcgaggaactcctccgacttctccttcatgccggcctcggcgtagtcacgcacatcctgggtgatcttcatcgaacagaagtgcgggccgcacatcgagcagaagtgcgacagcttgtgcgcatccttcggcagcgtttcgtcatggaactccctggccttctccggatccaggccaaggtggaactggtcttcccagcggaactcgaagcgcgccttgctcagtgcgttgtcacgtacctgcgcgcccggatggcccttggccaggtcggccgcatgcgcggcgatgcggtaggccatgatgccgtcacgcacgtcctggcgattgggcaggccgaggtgttccttcggcgtcacgtagcagagcatcgccgtgccgaaccaaccgatcatcgccgcaccgatcgcgctggtgatgtggtcgtagcccggcgcgatgtcggtggtcagcggccccagcgtgtagaacggcgcttcgccgcattcacgcagctgcttgtccatgttctccttgatcagctgcatcggcacgtggccggggccttcgatcatggtctgcacatcatgcttccaggcgatcttggtgagctcacccagcgtctccagctcaccgaactgcgccgcgtcgttggcatcggcgatgcagcccgggcgcaggccgtcacccagcgagaaggtcacgtcataggccttcatgatctcgcagatgtcttcgaagtgcgtgtagaggaaattctccctgtggtgcgccaggcaccacttggccatgatcgaaccaccacggctgacgatcccggtcacgcgcttggcggtgagcggcacgtagcgcagcagcacgccggcgtggatggtgaagtagtccacgccctgctcggcctgctcgatcagcgtgtcgcggaagatctcccaggtgagcgcttcggcgcggccgtcgaccttctccagcgcctggtagatcggcacggtaccgatcgccaccggcgagttgcggatgatccactcgcgggtttcgtggatgtgcttgccggtggacaggtccatcacggtgtcaccaccccagcggatcgcccacaccagtttccccacctcttcggcaatgcccgaggacaccgcgctgttgccgatgttggcgttgatcttggtcaggaagttgcggccgatgatcatcggctcgctttccgggtggttgatgttgttgggcagcaccgcgcggccgcgcgcgatttcatcgcgcacgaactccggcgtgatgatcttctggatcgaggcgccgaacgcctcgcccgggtgctgctgcagcaggccggcatcgcggatcgcgtccagccgctggttttcgcggatggcgacgaattccatttccggcgtgatgatgccgcggcgcgcatagtgcatctgggtgacgttcgcgcctgcacgtgcacggcgcggcaggctgcgtgtggggaagcgcacagcatcgagcttcgggtcgtgctcgcgatcgcggccaaacgacgaactcaggccgtcgagctgttcggtatcgccgcgctcctccacccagccacgacgcagcgccggcaggcccgcggacagatcgatacgcgcgtccggatcggtgtacgggcccgacgtatcgtagaccgtgaccggtgcattctcctcgccgccgaacagcgtcggcgtgcgggtcaacgcgatctcgcgcatcggcacctgcagatccggacgcgaaccgggtacgtggatcttgcgcgagccgggaatgggccgggtcacggattcggagagttgctgggcctgttgctgcagggcggagagctgtgcgttcatcgggcatcgtccaggaaggtcagggacgaagcggcggcgcacggcacccgcgcacggacggtccttgggcggagtccgggcacggctgcattgcaaagcttccctacgccggtatgagccggatcaggttccaagggactgtctcaaccgtggccacatggcccggtacccccgcttcttggtgcgcattagagcatagaccgcccgcccccgcggtcagatccgctttcctgtggaaagcggatctgatccggatcgctgttcgttaacagaaccatgacgtcgcgttcagtaacgtgcacgtccgtcgccctccagcgaccgatgcctccttcgccgccgacgcggcccctgcccggttcgcgctgcatgccgccggtccttcgctgcaagctctgctcgctcccctcaatcccttgatcggagaagctccttcatggtgtttcgcgtttccatcgcactcgttctgctgctggtgctgcttgccggtattgcaccaggccccttcaatgccgtggtgcagtcgatgctggcagaagtcatccgcagcgtcggctggctgtacctgctggtggtattcctggccctggtgttcctgatgtacctggctttcggtcgcttcggcaacctgcgcatcggtggcgaagacgccgagcccgagttctcgcgagccagctggatgtcgatgctgttcgccgccggcatgggcatcggcctggtgttctggggcgccgccgagcccatttcgcacttcagcaagccaccggaagggcttgctccgcagagcctggatgcggcacgcgcctcgatgcgctatgcattcttccactggggcctgcacccgtgggccatctatgcgctgatcgggctggcaatggcctggttccagttcaatcgcaacggccgcggcctggtcagcgacatgctgcagccgatcatcggccgccaccatcgcggctggatcggtagggtggtcaacatcgctgcagtcgtcgccaccgcgatcggtgtcgcgactacgctgggcttcggcaccatccagatcgccgccggcatcgagcgcgtgttcggcgtgcaggctaccgtcgcagtgcagatgaccatcattgccgtcgccttcgtgctgtatatggcgtccaccgccagtggcgtggagcgaggtgtgaagtggctgtccaatttcaacctggcgttggctgccctgctggccgccatcctgctggtgctggggccgaccggattcatcttcgatacgttcaccaccacgctgggctcctacctcaaccagctggtgacgatgagcctgcgcatgtcaccgttctccggcagcacctgggtggcggactggacaatcttctactgggcctggtggatctcgtgggcaccgttcgtggggtcgttcatcgcacgcatctcgcgcggccgcagcgtgcgcgagttcgtgatcggcgtggtgctcgcgccgacgctgctgggtttcttctggttcgccgttttcggtggaacggccttgtgggcacagatcttcggccatgccgatctggtgcaggcgctgggcaatggatatgagacggtgttgttcacgttgttcgacagcatgccgctgccgctgctgctgtcgtgcatcgcactggtactgctgatgatcttcttcgtgacctcggccgactcggcggtactggtgctggccagcatgtccactgacgaggctggcgatcctccgttgaagcgcaagctggcctggggcattgcggtggcgttgatcgcagcggccttgctgctggccggtggcctggatgcactgcagggcatgatcacgattgcggcgttgccattcgcgctgctgatggtgctggtgatggtgtcgctgtaccgcgtgctcgaccaggagtacacgcgtgagcggcggcaggcgcagcgccagcggcacatgatcgatgcgtggatcgcgcgcgagatggcggcgcaggaggagacccaggccgaggcggcgcgcgcgcaggattcggattgaggatgttttgcagcctgcggctgcactgcctttttcaagcaacggcaacgtctaaaccggctctgggatgctgagggtttggcggggcggtgtgggtgggcaggacacgccgtgaacccatccttgggggctcgatggcgccatccatggcgccaacggtcctgcccacccacaccgccccacgcccgacagatttccggtgacggttggttttccacgctttgcgtggaagaggtgtatcggaaaacaagaaggggtcggattcgttttcctgcggaaaacggatccgaccccaacccaaagcccgcggctgttgccgttgcctttgctcttgctcttctttttcttttcctgcggtgacggacacggaaactgtccgtggccgggcgggtgggttggctgggggcgtgagccgcatggatgcgacgtgttcacggcgtcccccagacaatccacccgcccggccaagccaagcatcgctgaaccatcaccggagagggggctgcgcccggtggccgggaaacctcaataccccgccgcctgcccatccttgcgactctccgaagctccgtaataaaccccgctctcggggtcgcgcatgatcgcctggtacccgccataaggcccatcggcgaacacgatgcgatgccccttgcgcatcagcgcacgcaccgtctcgtaggggaagccggtttccagattcacttcgccgccatcggtcatcgccgtggcctgacccgtcggttcagtcgagccttcgtgctggatgcgcggcgcatcaccggcttcctgcaggttcatcccgaaatccaccaggttcatcacgatctgcgcatggccctgcggctgcatcgcgccgcccatcacgccgaagctggcatacggcttgccgcccttggtgatgaaccccggaatgatggtctggaatggacgcttgcccggcgcgtagccgttgggatggttcttctgcagcacgaacatctcgccacggtcctgcaggatgaaacccagaccgggcggtgccatgccgctgcccatgccacggtagttggactggatcagcgaaaccatcatgccgtcggcgtcggccacggtcatgtagatcgtgtcgccctcctccagctgcttcggcgtgcccggctgcacttccttcaacgccttgtccatcgaaatcagcgcgcggcgctgcgcggcgtactccttggagatgagcttctgcaccggcgccggctggaacgccatgtcggcgtagaagcgtgcacggtcggcgaaggccagcttcttcgcttcgacgaacaggtgcacgtgctcgggtgaaccgaaccggatcttcgagaaatcgtagccttccagcacgttgaggatctgcagcgcggcgatgccctggctgttcggcggcagctcccacacgtcgtagccacggtagttgctgctgaccggttcgacccactcaccatggtggtcggccatgtcctggtagctcaggtagccaccattggccttgaagtaatcgccgatggtgtgggcaatggcgcccttgtagaaggcatcgcgtccgccgtcggcaatctgctgcagggtgctggccaggttcgggttcttccacatctcgcccttgcgcggggcgtggccgttgatcgtgaactgctccttgaagcccgggtactgcgacagcttgggcaccgagcggtcccagtagtaggcgatcacctcggcgacgggatggccctcgcgcgcgtagcggatggccggcgccaggttgtcggccatcggcttgcggccgaagcggtcgtgcagcgcgaaccagccgtcgaccgcgccgggcacggagaccggcagcgggccggtggccgggatgtccttcaggccacgtcgctggaactcggccagggtcagcgacttcggcgagcgccccgaaccgttgtagccgtagagcttctgcgtcttcgggtcccagacgatggcgaacaggtcgccaccgatgccgttgccggtcggctccatcaggccaagcgcggcgttggcggcgatcgccgcgtccaccgccgagcctccccctttcatcacgtccagtgcaatctgggtggccagcggctgcgaggtagcggccatcgcatgcggggcgatcacctccgaacgggtggcaaaggtgtggccggtgatgcggtcggcggccgaagacagtgcgggcacagcggccagtacagcggcggccagcagggaacgggcaaggcgtcgggacacggtcgggttccgatggaagggtggtcccccgatcttcgccgctgcggccatcctggggtatcgggcagaggtcatggacgttggtcctggggtgggtgtgcaaggtccgcacccagcaaggcgaggatccgccggattccgcgcaaaaaccgtcctgaaaggagtgaattccggttcaccgaaacactttcagcggcaaccatccttgtgccacaggcgattgcgccggatgcaacggaaaccaacaagaattccgtcgcgagggttgacatcgccaaaacggctgtgtttctctcgatcacatgttgcatcacaacacgccaccgcgaacccacaacgaagccgccgacatcggcgccgcctcgctgcgttcgattcttgtgctcgtacttattacccaaccaacaggtgcgggacgagccagcgtgtaagcaacgaatacaccggaactcttcaaaaacccgcacccgccccggtgcgggttttttcatttcagaacctggtttcagacgcaaccaccatgcacaccgcccaacgcaaaacccggacccacaccgccgccacgcctcgtggtggctgtgcctgcgcggcgcatggtgcctcctccaccgctttcccctgaccggccggtacgtcacctcgacgaccggccgttcttttttttcttcccaccgcaaggaacctcccccatgagcaccaacgacctgccccagaccaagatcgccgtcatcggctacggcagccagggccgcgcccacgcactgaacctgcgcgaatccggcttcgacgtggtggtaggcctgcgtccgggcggcccgaccgaagtcaaggcacaggccgacggcttcaccgtgaaagcaccggccgacgcggtgaaggatgcggacctggtcgccgtgctgaccccggacatggtgcagaagaagctctacgacgacgtgctggcgccgaacatgaagcagggtgcggtgctgctgttcgcgcacggcctgaacgtgcacttcgacatgatcaggccgcgcgacgacctggacgtggtgctggttgcgcccaagggccctggcgcgctggtgcgccgcgagtacgagatcggccgtggcgtgccctgcatctgggcggtctaccaggacaagagcggcaaggcggccgagtacgcactggcctatgcggccggcctcggcggtgcacgcgccaacctgatccagaccaccttcaaggaagagaccgagaccgacctgttcggcgagcaggcggtgctgtgcggcggtgcctcggcactggtgcaggccggtttcgagaccctggtcgaagcgggctaccagccggagatcgcctactacgaagtgctgcacgaactgaagctgatcgtcgacctgttctatgaaggcggtatctcccgcatgctggaattcatctccgagaccgcgcagtacggcgactacgtcagcggcccgcgggtgatcgacgccggcaccaaggcgcgcatgaaggaagtgctgaaggacatccaggacggcaccttcaccaagaactgggtggccgagtacgaagcgggcctgccgaactacaaccggttcaagcaggccgacctggagcacccgatcgagaaggtgggcaaggaactgcgcgccaagatggtctggttgcaaggacaggccgcgtaaccgcgcggccctcccccacccgctttgcaaggttcccccatgaactcttccacacaccgcagcgcgccgcccaacggcgcgcgctggctgacccaggcgctggaagccgaaggcatccgcacgctgttcggctatcccggcggcaccatcatgccgttctacgacgcgctggtggattcgtcgctgaagcacatcttggtgcgccacgagcagggtgccgcactggcggcgaatggattcgcccgcgccagcggccaggtcggcgtctgcgtggccacctccggcccgggcgcctccaacctggtcaccggcattgccgatgcgatgctggattcggtgccgatggtctgcatcaccggccaggtcgccacgccgctgctgggtactgacgctttccaggaactggatgtgttcggcctgaccatgccgatcgtcaagcacagctggctggtgcgcagcgtcgacgacctgccgcgcgtggtcgccgatgccttccgcgtcgcccgcgagggccggcccggccctgtgctgatcgacctgcccaaggacgtgcagctggccgatgccagccacctgccggcgcacgtgccgagcagcgtcgagccgccacctgcgccggccgaagcggccatcgccgaagccatcgccgcactggcggccgccgagaagccggtggtctacgccggtggcggcatcgcgctgggcgatgcggtgcaggacctgcgcgacttcgtcgaagccagcgccatccccaccgtgatgaccctgcgtggcctgggcgcgctgccggccagccatccgcagtcactgggcatgctgggcatgcacggtacccgcgcggccaacatggcggtgcaggaaagcgacctgctgctggtgctgggtgcacgcttcgacgaccgcgccaccggcaagctggccgagttcgcaccgttcgcccgcgtcgtccatatcgatgccgacgcctacgagatctccaagctgcgcagcgccgatgtcgccgtgcctggcaacgtcggccatgccatccgtgccctgcgtgcggccttcccctcccccaaggcccaccaggacgcgtggcgcaggcgttgcgcgcagcaccgcgaccgcttctcggcacgctacgacgcaccgggccagcacatctacgccccggcgctgctgaagcgcctgagcgagctggccccggccgatgcggtgatcgcctgcgatgtcggccagcaccagatgtgggtggcgcagcactgccgcttcaaccacccgcgcaaccacctgaccagtggcgcgctgggcaccatgggcttcggcctgccggcggcgatgggtgcgcagttcgcatgcccggagcgcaccgtggtgctggtgtccggcgacggcagcttcatgatgaacgtgcaggagctggcgaccatcgcgcgttgccgcctgccggtgaagatcgtgctgctggacaacagttcgctgggcatggtgcggcagtggcaggaactgttcttcgccgagcgttacagcgagatcgacctgtccgacaacccggacttcgtggcgctggcacaggtgttcggcatcgccgccacccgcatcgacaaccgcgacgacgtggaaggcggcctggccgcgctgctggccgaaccgggcccggccctgctgcacgtggccatcgatgcacgtgccaacgtgtggccactggtgccgccgaacaccgccaacagcacgatgctggaaagcaaccccgcccatgcccgccaggagacccccaatgcaataccggcttgacctggtgctgcacccggccgaaggcgcgctgctgcgcgtgatcggcatggccgaacgccgcggcttcgcaccgcgcgcgatcagcggtgcgccggtggccgacgacgatggccgctggcacctgcagctggtggtggatggccagcgcccggcggaaacgctgtgccggcagatcgagaagatctacgactgcgtgtccgtgcaggtcactgccgtggaaggagcatccgtatgaacacccgtaccgtagtgaccacggtgccggtacggaggcgtcttcttcgccgcccgtgcccgcatgcggcggtcgcccgcaccgcgctggtggcccatgccggccgctgatgccagccaggaaagcgatgtcggcgacgtaagcgtcgccgacgtactggcggcgcaggcccggctgcggcgcttcctgccgcctaccccgctgcaccatgccgagcgcttcggcacctggctgaagctggagaacctgcagcgcaccgggtcctacaaggtacgcggcgcgttgaacgcgttgctggccggccgcgagcgcggcgatacccggccggtgatctgcgcctcggccggcaaccatgcccagggcgtggcgtgggcggcctaccgcctggacgtgccggccatcaccgtgatgccgcatggcgcaccggccaccaagatcgccggcgtcgcccactggggcgcgaccgttcgccagcacggcaccagctacgacgaggcctacgccttcgcggtcgaactggcacagcgacacggctaccgcttcctgtccgcgttcgacgacgccgatgtgatcgcgggccagggcacggtcggcatcgagctggccgcacacgcgccggacgtggtgatcgtgccgatcggcggcggtggactggcctccggcgttgcactggcgctgaaatcgcagggcgtgcgcgtgattggcgcgcaggtggaaggcgtcgattcgatgacacgtgcgatccgcggcgacgtgcgcgagatcgccccggttgcctctctggccgacggcgtgcgggtgaagattcccggcttcctgacccgccgcctgtgcacctcgctgctggacgatgtggtgatcgtgcgcgaggccgaactgcgcgaaacgctggtccggcttgcgctggaggaacacatcatcgccgagggcgcgggcgcgttggcgctggcggccggccgccgcgtcgccggccgccgcaagtgtgcggtggtgtccggcggcaacatcgatgccggtgtcctggccggcctgctcaccgacatccgtccgcgcccgccacgcaaaccgcggcgacggcgcagcgaaaccccgcgctcgccgaccaaggccagcgccctcgcctcccccgcctcttccccttcccccctgcaagccgtcgcacccgctgtcgaggagatttccctgtgaccaccatcgaacgaattaccaccccgcgcatccgcatcttcgacaccaccctgcgtgacggcgagcagtcccccggctgcagcatgagcccgccgcagaagctggtgatggcgcgtgcgctggacgaactgggcgtggacatcatcgagacgggcttcccggccagctcgcaatccgaccgcgaggcgatggcgctgatcggccgcgagctgcgtcgcccgagcctgagcctggcggtgctgtcgcgctgcctgcaggccgatatcgagacctccgcacgtgcactggaagcggcagccaacccgcgcctgcacgtgttcctgtcgaccagcccgctgcaccgcgagcacaagctgcggatgacccgcgagcaggtgctggagtcggtacgcaagcacgtctcgttggcccgttcctacatcgatgacgtcgagttctcggccgaggatgccacccgcaccgagctggactacctgatcgaggtttcgcgcgtggcgattgccgccggcgccaccaccatcaacctgcccgacaccgtcggcttcaccacgccggaagaaatccgcgcgatgttccagcaggtcatcgccggggtcgccgacgtgccgaacgcggccaacgtgatcttcagcgcgcactgccacaacgacctgggcctggcggtggccaactcgctggccgccatcgaaggcggtgcacgccaggtcgagtgcaccatcaacggcatcggcgagcgcgccggcaactgttcgctggaagagatcgcgatggtgctgaaggtccgccaggccttctacgaacaggacagttcgatcaacaccccgcgcatcgtcggcacttcgcagctgctgcagcgtctggtcggcatgccggtacagcgcaacaaggccatcgtcggtgccaacgcgttcgcccatgaatcgggcatccaccagcacggcatgctgcgccaccgcggcacctacgaaatcatgcgtccggaagacgtgggctgggaagattcgcagatggtgctgggccgccacagtggccgcgccgccgtcgaagcgcgcctgcgtgcgttgggcttctggctggacgaagacgaactgaagctggtgttcgagcagttcaagggcctgtgcgaacagcagcgcgtggtcaccgatgccgacctgcagacgttgatgcagggcggctccaacgcgcagggctaccgcctggcctcgatgaccatcagcgacgtcggcagccgcgccaacgcgctggtcgaactgtccgacccggatggcaaccgcgtggccgagaccgcgcagggcgacggcccggtcgatgcgctgttcggcgcgctgtcggccgctaccggcgtgcagctgatgctggacagctaccacgtgcacagcgtcggcatcggcgccgatgcgcgcggtgaagccaacctgagtgtgcgccatgacggcgtggagtacgacggcaccggcaccagcaaggacatcatcgaagcctccgcgctggcctggctggatgtggccaaccgcctgctgcgccagcgtcaggccgccgtccacagcagcgccgacgttcccgcttccgccaccgcctgaggatcccaccatgagcgccttcgacacccccaccccggccagcgccgctggccagcagtggaacgcccaggactatgcgatcgatgccggcttcgtgccgctgctcggcggtgcggtatcgcgcctgctcgacccgcgcgccggtgagcgcatcctcgacctgggctgtggcgatggcgtactcagcaccgaactggccctgagcggtgcgcgcatccacggcgtggatgcctcgccggaactggtgatcgccgcccgtgcgcgcggcgtcgacgcccagctgatggacggccacgcactgtcgttcgacagcgagttcgatgcggtgttcagcaatgcggcactgcattggatgacgactccggaccgcgtgctggaaggcgtgcgccgcgccctgcgccccggtggccgcttcgtcgcggagttcggcggccacggcaacgtggccacgatcatcgcggccgtgcaggccgcgcgcgtggcccacgggcatggcgccagcaccttccggtggtacttcccgacggccgacgcctacgccgatcgcctgcgccagcatggcttccaggtgcaactgatcgagtgcacgccgcgcccgaccgcactgccgaccggcgtggccggctggctgcgggtattcgccgcaccgctgctggacgacctgccggccgaggcccgcgccaccgtgcgcgaggcggccaccgcactgctggccgagctgccgcgtgacgcatctggccagccgctggccgactacgtgcgcctgcgtgtgctcgcccgccgtcgctgacttgaccgttccgctttccttactgatgttcgctatttcgtacttctgccaggcatacgcatgacttccgcaccccgcaccctgtacgacaaactgtgggacgcccacgtggtggttcccgaatccgacagcgcgcccgccgtgctgtacatcgacctgcacctgatccacgaggtgacctcgccgcaggccttcaccgaactgcgcgaacgcggcttgtcgccgcgccggccggaccgcaccaaggcgacgatggaccactccacgccgaccctgccggccgccgcggacggcacgctgccctatgccagcgccgcctccgaggcacaggtcgccacgctggcgcgcaactgcgccgagcacggcatcgagctgttcgacatggcctcggacaaccgcggcatcgtccacgtgatcgcgcccgagcagggcttcacccagccgggcatgaccatcgtctgcggcgacagccacacctccacccacggtgccttcggttcgctggcgttcggcatcggcaccagcgaggtcggccacgtgctggccacgcaatgcctgctgcagcgcaaggcgaagacgctggcgatcaccgtcgatgggccgctggcgccgggtgtcggcgccaaggacgtggtcctgcacatcatcggcgtgatcggcgtcaatggcggcaccggccacgtgatcgagttccgcggcagcaccatcgaagcgatggacatggaacagcgcatgaccctgtgcaacatgtcgatcgaagcgggtgcgcgtgccggtatggtggcgccggaccaggtcaccttcaacttcgtcgccgctacgccgcgcgggccgaagggcgccgatttcgacgccgccgtggcgcgctggcagcagctgcgcagcgatgagggcgcgcgtttcgacagcgaagtgcacatcgacgccgccgatatccgcccgaccctgacctggggcacccacccgggtaccgccatcgcggtggatgcgccgatcccggccgccaacgatgccgccgcacagaagggcctggactacatgcatttccaggccggcaaggcgctggccggaacgccggtggacgtggtgttcgtcggttcctgcaccaacggccgcctgagtgacatgcgtgaggtggcgcaggtgctgcgcggtcgtcgcgtcgccgaccgggtgcgcatgctggtggtgccgggctcggagatcgtcaagcgagaggccgaggccgaaggcatccatgagatcgtgcgcgcggccggtgccgaatggcgcgagccgggctgctcgatgtgcatcgccatgaatggtgatctggtcgcgcccgggcagctggccgtgagcaccagcaaccgtaatttcgaaggccgccagggtcccggttcgcgcaccctgctggcctcaccgatgagcgcggcgtgggccgcggtgaacgggcatgtcgccgacacccgcgagctgttcgcacaggaggtggcgtgatggccggtttccgtaccttgacctcggccagcgtggtgctgcgccagaccaacatcgacaccgaccagatcatcccggcgcggttcctgtccaccaccgaacgcgccggcctgggccgcaacgccttcaatgactggcgctggcaggccgacggttcaccggtggccgacttcgccttcaaccagccgcacaacgccggccgcagcatcctgctggcgggtcgcaacttcggctgcggctcgtcgcgcgaacatgcaccgtgggcgctgaccgacctgggcctgcgcgccatcgtcagcagcgagatcgccgacatcttccgtggcaactcgctgaagaacggcctgctgccgatcgtgctggacgaggccgacgtgcaggcgctgatgcagcgcccggatgatgagctgaccatcgacgtggccgcgcgcgaactgcgcacgccggacggccgcgtctattccttcccgctggacggcttctcgcagacctgcctgctggaaggtgtcgaccagttggggtatctgttgggccgtgtccctgaaatcgaacgttacgagagtgagcatgcacgctgaaattgttgtcctgcccggtgatggcatcggcccggaagtggccgccgcggcagtcgccgtcctgaaggccgtcgccaaacgcttcaaccacaccttcaccttcagcgagcacgacatcggtggcatcgccatcgaccgccacggcgaaccgctgccggcgtcgaccctggccgcctgccaggccgccagcgcggtgctgctgggcgcagtcggtggaccgaagtggtccgacccgaacgccaaggtgcgtccggaacagggcctgctggcgatccgcaaggcgctgggcctgtacgccaacctgcgcccggtgcgcacccatgaggccgcgctgcacgcctcgccgatcaaggccgagctgctgcagggtgtggacttcgtggtggtgcgcgaactgaccggcggcatctacttcggcgacaagacccgcgatgccgacagtgccagcgacctgtgccgctacaccgtggccgagatcgagcgcgtgctgcgcagtgccttccgcctggcccggcagcggcgtggcaaggtcacctcggtggacaaggccaacgtgttggaaacctcgcgcctgtggcgcgacgtggccgcgcgcatcggccgcgaggagttcccggaggtggcgctggagcaccagctggtcgattcgatggccatgcacctgctggccaagccgcgcgagtacgacgtgatcgtcaccgagaacatgttcggcgacatcctcaccgacgaagcctcgatgctggccggctcactcggcctgctgccctcggcctcgctgggtgaaccgggtgcggtgggcatctacgaaccgatccacggttcggccccggacatcgccggcaagggcatcgccaatccctacgcgacgatcttcagcgcggcgatgctgctgcgccattcgctggggctggaagacgaagccgcagcagtggaagcggcggtgcacgcggtgctggatgatggggtgttcactgccgacctggccgccaagggccaggccgtgagtaccgccgccgccacggatgcggtgctggccaaactcaactgatccgatggcgccactccatgcgtggcgcctctgcctttggtcattgtgcgcagccacccatggggtggctctactgtagatccacgccatgcgtggatcgttcgaatgtcgcgcagcagatccacgccatgcgcggctgcattatttggtggtgtacccaccattgaccaggatggtctgcccggtcatccaccagccatcggtgaccaggaagcggatccacggcacgatgtcggcgatgtcggtcaggccggtacgggtgaacgccgagagcgcggccgcggtcttgtggtacgcctgtgcatcggcactctcggccgggtagaagaacggcgtgtccatcgggcccggcccgatcgcagtcaccgagatgccgcgctcaccgaactcctttgacgccgcgcgggtgaaatgctcgaccggcgccttggtgccggcatagctggaatagaacggcgtgaacgcacccagcagtgaggtgaccagggtgcagatgcgaccgccgtcgttgacctggcggccggcctccttgaggaagaagaatgcggccttggcgttgaccgcgctcatctcgtcgtactccgcttcgctgatgtccagcagcggcttcttcaataccttgccgaccgtattgatggcgatgtcgggacggccggctgcggccacggcatcggcgaacaagcgctccatcgctgccgccgaggtcaggtcgccctgcagggccaccgccttgctgccggccgcctgcacggcggcaacggttgcttctgcatcggcctgggtagcggcactgttgtagtggatgacgatggctttggcgccctgtgcggcgaagtcgcgggcgatcaggccgcccaggttcttggcaccaccggcaatcagcacagtcttgcccttgagggaatggtcggtcatggcttcggtctcaggagggggctgcccgggtggcaaccctgccctgacgacgatatcgtgcagaaaatgcggataaagcccgccacattgacttaactttccaggaccagcgaacaatggaccggatcgatcgcttccgcatcttcacccgggtcgtggaatgcgccagcttcacccgtgctgccgaccagctcggcctgccccgctcgaccgtctcggcggcgattgccgagctggaacagcggcttggcacccgcctgctgcagcgctcgacccgacgggtatccaccacccatgacggcgacgtgttccatgcccgctgcctgcgcctgatcgcggaggttgaagacgccgagtcgctgttccggcaggacgacgcgcaaccggccggtttgctgaagatcgacgtacccagccgcatcggccgtcgcatcatcgccccggcgttgccggatttcttcgcgcgctacccgcaggtggaactggacctgggcatgaccgaccgcgcggtgaacctgatcgaagacggctgcgatgccgtgctgcgggtcggccagctgggcgattccagcctggtggcgcgcacgctgggccagctcgacttcgtcaacgtggccgcgccggcctacctgcgcgagcacggcatgccgcagcaccctgccgacctgcagcagcaccgcgcggtgaactacgcatcgccgaccacggcacgggtggaaccgtgggaatggcaggatggcggccagctgcgcacgctgccgatgcccggctgggtacgcgtgaacagcgccgaggcctcgatcgcgtgctgcgtggcgggattggggctgttgcagattccgcgctacgacgtgcaggccgagctgcagtcaggcgcattggtggaggtgatgccgcagtacgcggcgcagccgctgccggtgaccctgctgcaaccgcatcggcaacaccgtgcactgcgcgtgcaggtgttcgtcgagtggctgctgccagtgctgcggatcggcctgcagctgcagtagatccacgccatgcgtgggtgcttctgtagagtcgagccatgctcgactcatcccatcatcgcgcgaagagcgaagagcagccgagcatggctcggctctacagaaagcagatcccgcgagcagatcagtccacgccatgcgtggatgcatgctgcagtgccaaccaaggttggcacctaccagggcaacgatccgctgctgtagatgcacgtcatgcgtgggtgcttctgtagagtcgagccatgctcgactcatcccatcatcgcgcatagcgcagccgagcatggctcggctctacagaaggcagattccgcgagcagatccatccacgccatgcgtggatgggtgcagccgcagaacccggggcattacgccccggattcgtccggcttcacccggaaccacgccgcgtacaacgccggcaggaacaccagcgtcagcaccgtacccacgatcagaccacccatgatcgagatcgccatcgagccatagaacgcgctgcgcgacagcggaatcatcgccagcacggccgccagcgcggtcagcacgatcgggcggaagcggcgcaccgtggcatcgatgatcgaatgccagcggtcatgcccggcatcgatgtcctgctggatctggtcgatcaggatcaccgagttgcgcatgatcatgccggccagcgcgatcgtgcccagcagcgcgacgaagccgaacggcgcacggaacagcagcaggaacagggtcgcaccgatgatgcccagcggcgcggtcaccagcaccatcgccgcacgcgagaagctgcgcagctgcagcatcagcagcgtcgccaccaccaccaggaacagcggcatgccggccttgatcgagttctggccgcgcgccgagtcctccacggtgccgccggtctccagcaggtagccgctgggcagctcggcacggatgccatccagcgtgggcacgatctggtgcaccacgtccagcgcctgcatgccatcgctgatgtcggcgcgcacggtcacggtcggcaaccggttgcggtgccagatgatgccgtcctcgaagccgtactccatcgtcgccacctgcgacagcgtgatgctgccgccgttggcggtcggcatcgacaggctggacagcagctccagctggttgcgctcatcggccggcccgcgcagcagcatctcgatctggcggttgccttcgcgatacacgctcaccgactggccggccagcgaactggccaggaactggctgacctgggcgctgctcacgcccagcgcgcgggcacgctcctggtcgatcaccagccgcaccaccttgctcggctcgctccagtccaggttgacgttcatcacgtgcgggttctcacgcaccttggcctcgacctggcgcgcgatcgcctgcaccttctcgatgtgctcgccggagatgcgcatctgcaccggataaccgaccggcgggccgttctccaggcgggtcacgcgcatctgcacgtccgggaacttcggaatcacctcgtgcagcagccagtcacgagtgctttcgcgcgatttgatgtccttggccagcaccacgaactgggcgaagttggtcgccggcagctgctggtccagcggcaggtagaagcgcggcgaaccggtacccacataggacacatagttggcgatgccctcgcggctggacagcagcttctccagcttctcggcctgggcctgggtcgagcgcagcgacgccccctcggccagctcgatgtccaccatcagttccggccgggtcgagtccgggaagaactgctgcggcacgaagcggaacatcatcagtgagaacacgaacagggcgacggtcgcggcgatcacccaccagcggcggcgcaggcaggcgtcgaggaagcgccggaagctgcggtagaacgggcgctggtagggatcgtggtcgtgcccatgctgcggcggtgcgatcaggttggccagcgccggatagcggtcggcccactgctggcgcttggccagccaacgcgcggacaggctgccgggcttcggcggctgcggattgaacaggtccggcagcatcttgtcgcccaggtacgggatgaacagcaccgctgcgatccatgacaccaccagtgcgatggtcaccacttggaacagcgaacgggtgtattcaccggtgctcgatgccgccgtggcgatcggcaggaagccggctgccgtgatcaatgtgccggtcagcatcgggaacgcggtcgattcccaggcgaagctggccgcgcgcaggcgatcgaagccctgctccatcttggtggccatcatctccaccgcgatgatcgcatcgtccaccagcaggcccagcgccagcaccagtgcgcccaacgaaatcttgtgcaggccgatgtcgaagtaatgcatgacgaagaaggtcatcgccagcaccagcggaatggtcacgcccaccaccaggccggtgcgcaggcccagcgagaagaaactgaccagcagcacgatcaccaccgcttcggtcagcacctgcacgaactcgccaaccgactcctccaccgactgcggctggtcggacaccttgcgcagctgcatgccggccggcagggtcttctgaagccgctcgaactcggcgtcgaggttggcgcccagcttgaggatgtcaccgccatccttcatcgccaccgccaggccgatcgcctcttcgcccatgaagcgcatcttcggcgacgccggatcggcgaagccacgcttgacctcggcgatgtcgcccaggtgcacggtgcggtcgccagcacggatcgggaactggcggatggcgtcgatgtcgttgaactggcccgtcacgcgcagctgcacgcgatcggtggcggtctcgaagaagctggcgccggtgatcgcattctggtcggccagcgcctgctgcacctgctgcatcgacacacccagcgttgccagccgggtgttggacagttcgatccacaccttctcgtcctgcaggccgaccaggtcgatcttgccgacatcgggtacgcgctgcagttccagctggatgcggtcggcgtagtcgcgcatcaccgcgtagtcgaagcccttgccggtcaacgcatagatgttcccgtaggtgtcgccgaactcatcgttgaagaacgggccgacaatctcgcgcggcagcgtcgcacggatgtcgcccacgcgcttgcgaacctggtaccacaggtccgggatctgcctggaacgcaggctgtcgcgcgccatgaagatgacctgcgattcgccggggcgcgaataggagcggatgaactcgtactcgccggtgttcatcagcgccttctcgatcggctcggtcacctgccgcgagacctgttcggcggtggcgcccggccaaagcgtgcgcaccaccatcgccttgaaggtgaatggcggatcctcggactggcccagatgcttgtacgaccatgcgccgatcagcgcgaaggcaagcatcgcgaacagcaccagcgggcggttggacaacgcccactcggaaagattgaagcggcgcaccggcttactccttggccttggcggcagcggccggcgtggccggcttcagcaccgggcggttctggcggtccacggcgatcaccggctggccggcacgcaacaggtgtccgccggcagcgaccacccagtcacccgcattcacgccggacagcaccggtaccgattcgctgccataggcaccggtggtgaccgacgcggccttcagcgtgctgttggccggatcgaccacccacacgctggcggcaccgttggcaccgcgctgcagcgcaccgagcggcagctgcagggtgccgtggcggccggcgctgctgtagacgcgcgcgctctggcccagttcgacatcggccagcgcatcggcgggcaggctgacccgggttgcataggtgcgtgcctgtggatcggcggcagcggcgatctcgcggatcgtgcctggcaggcgctggccaggacggttccacagctccacctcgaccggctggcccaccgcatagtcgcggatggtggcctcgggcaggtcgatcagcacttcgcgcccgccatcggcggccaggttgaagatggtctggccggccgacaccacctgcccggcttcggcctcgcggctggcgatcacgccatcggacggcgcgcgcagctgtgcgtagtcggcctggttgcgcagcacatcgaggttggcgcgggcggcgttggcctggccctgcgcggccttgaaggcggcggactgctggtccagctgcgagcggctgaccagctgctggtcggccagcacctggtagcgcttgaggtcatcacgggcacgcaccagatcggcttcggccgcagcaagctgcgcctgcgaggcgcgggcctgcagcgcgaagtcggccacgtccagctcggccagcacgtcgcccttcttcacccgttgcccggcatcgacgtggcgcttgaccaggttgccgccaacgcggaacgacagtggactttcctgccgcgcacgcaccgtgcccgggaacgccgccggcgcctgcccggcctgctcgccagggtgaaccaccagcaccggaacggccgcctggggcgcccgttcctgtcccgaacaggctgccagcgcagccatccacaccataccgcccatccagcgcacgatcttcatcggtcaacgtcctgaaaacgcagggttgcaactaaggggggagccgcgactgccggccctatttaataaaccggccggtatagtataaatatcgaaccgcttggtctagtattgtcgtgatgagttctcacacttcccgcaagccgtcggccaagcccgctgccaaggccgccggacccgggcgccccaaggacctcggcaagcgcgcggcgatccttgaaacagccaagacactgttcatcgaacagggctataccggcgtgagcatggacaccatcgccgctcaggccggcgtctcgaaactgactgtgtacagccacttcggcgacaaggagaccctgttctccgaggccgtgcagtcgaagtgcattgaaatgctgcccgatgccctgttcgtggccgacgcggacggcccgctgcgcgaccagctgatcggcatcggtctggccttcttcgaactgatcacgtccgatgcggcgatctcgatccagcgcatgatgatggcgccggagaccgacgaacgcctgcgcgagctgttctggaaggcaggaccggaacgtacctgcgaggccctggctgacttcctgcgggcacgcgccgagcgcggcgagctggaaatcaccgactattcgctggctggcgagcagttcctgaccctggtcaagggcgaagtgcacatgcatatgatgtgcggcatgccactgtcaccggtggaatgcgaccctcttgcccacgtgactgccagcatcgacttcttcctgcgcgcctatgcgccgcgaggggccgggacgtctgaataaccaaaactgaacgaaccggaggtcgcgatgacttccggcactgcgaccccggccacccggcagctgatgctctgggcgcgccgccggcctccggcaccggtaaaatggccggcccactgcgctggatttgaacctcatgacgattgattacgcccacgcccgcgaactgatggtggaacagcagatccgtccctgggacgtgctggacatcaaggtgctcgacgtcctggcccgcctgccgcgcgaggcttttgtcgccgatgcacaccgggcactggcctacgccgatgtcgaactgccgatcggccatggccagaagatgatgaagccggtcatcgagggccgtaccctgcaggcgctggacctgcagccgggtgacgaagtgctggaaatcggcaccggcagcggcttcctgtcggcctgcatcggcgcgctggcgcgcgacgtgctgagcctggaaatcgacccggagctggccgccgccgcgcgcgctcgcctggacgcgtccggcctgggcaccaacgtccgcgtggaagtggccgacgccctgtcctggcagaccgaacgccgctttgacgtgatctgtgtcactggtgcggtcgacgtggtgccgtcacagttcgcctcgtggctgcgtccgggtggtcgcctgttcgtgatccacggccgctcgccggcgatggaggccctgctggtcaaggccgacggcagcagcgagtccctgttcgagaccgatatcgattacctgcgtggtgccgccccggccccccagttccacctctgagtccaaggaagccgcaatgatccgccgatccctcgctgttgcgctggccactgccctgctgccgttgtccgcccatgccgccgacctgctgcaggtctacgaaatggcgcgcaatggcgatccgcagctgtccgccgccgaatcgacccggctgtatgacaaggaaggcgccgtgcaggcgcgcgccgccctgctgccgcagatcaacggccaggcccagctgaaccgcacgcgcagtgagccgaacgccgacgccaactccggctcgttcaccaacaagcgccgcacctacacgatcgacggcagccagacgctgttcaactggacccagatcaacaacctgcgttcgcagcgcgagctgagcaaggcggcggacttcaccctcgattcggccaacgacagcctgatcgtgcgcacctcggcggcctacttcaacgtgctggtggcgatcgaatcgctgaatgccgcacagaccaatgaagcggccgcgaagaagcagttcgacttcgccgacaagcgcctggaagtgggcctggcgccgatcaccgacgtgcacgaagcacgcgcccagtacgaccaggcgcgtgccaacaccatcgttgcgcagaacaccctggccgataactaccaggccctgaccgaactgaccggccagccggtgaccaacctgcgtgggctgccggccgacttccgcccggaagtgccggccaaccgtggcaacatcgatgagctggtgcagcaggccaccacccagaatccggcgctgaaggcgcaggaactgaaggtcagcgccgccgaggctggcgtgcaggccgcccgtggcggccattacccgaccctgtcgctgggcggcagctggggcaagagcgcgacctggggtgacagcactggttccggttcgctgtcgccggacgcccgcaccaacagcatcggcctgaccctgagcgtgccgatcttctccggtggtgccacccagtccggcgtgcgccaggcgctggcccagcgtgacatcgcccaggacggctacgagcagcagaagcgcgccctggaccgcaacacccgcaatgcctaccagaccctggtacagggcatcagcgaagtggaggcccgtcgcctggccgtggtctcggcacagagcgcgtacgacgcctcgcaggtcggcctggaagtcggtacccgtaccgtgctggacgtgatccagaaccagcgcatcctgttctcggcgcagctggactacgcccaggcccgctacaccttcctgcagaaccgcctgctgctgagccagtcgctgggtgcgctggacgtggccgagctgcaggacgtcaaccgcctgctgacccaggacgcgggcaatccggcaacgaccacgcactgatccgtcgccctgccggcaacaaagaagccacccgcaagggtggcttttttgcaggcggtgcatccgcccgcagctgcccgttgcgcggccccgcgaaccctcagcccggccatgcccgcaggcgttccaacgccgcaaggacgcacagcgcggccgccaagggcgccagcatcggcagcaccagttcgcgaccggttgcgccctgcctcatgtcattccgccgccgcagcaccgccaggcacagcgccgccatcaccagcagggttgccggacccggcagcgccggcagggtgcccaacggcagccacagcaccagcatcaccgccggcagtccgaccaccgccacgatcacaccgcgggagcgtcccactgcatcacccgcccctggccacagcgatgttgccagccgcaaggccagcatcagcagcaccagctgcagggcggccaggcccgtagcccccgccagcggcaacaacggcagcatccactccaattgcggatgcatctgcagcgccaccgacagtggccggggactggccagcgcggaaaactcgaccagccctgcctgcagtgctgccagcacgatcagcagcagcatcgccagcaacgagaccagcgccagcactgccggttgccacatcgcgccctggcggcgcaacgcaggaaagcccagtgccaagccgacgctggcaaatacccccagcagcggcaccgcagccgccagcaccccgcccagcccgaagcgatacggcgcggtcgctggtggcagccaggggatccagtgcgcgtaatgcacatgacgtgccgccagcgccagcagcaacacccccgcaccgatcttcaccgtcaacagggcgcaggccaccagcaccacacgccgtggcggcagcaatgccagcgcgcccagcatcagcaggcccaccgccgccgtgacctgttccggcagccagtcgcagggctggaggccttcggcggccagcaccgcgtgcagatggagggccatggactgcgccacgcccgccgtggtcgccaccagctccagcagcagggccatgcccaacacgcccgccacccgcggcccccagctggcagccagcagcccgtgcaggccctcgcccgccggcaaccgcagcaccagatcctgcaggcagcacagcaccaggccggcccccagtgcagccagcaacaggctgagcacgatggcggggcctgcctgtgccgccgtgtgctggcccaccagtgcgatcacgctgccgcccaccaacagtgtcaacgccaccaccgccagatggtccgtccccagtccggccccacccgtgccgtccccgcccctgtcgccgtccatcgcaagttcccttgatatccgcccaagcgcggtcgacagcaggctggcagcctgcgtcgccctgcggaatcagaatcggtggaatgtgcgcaacgatgtgatggcaggcacgctgccagcggcagggtcggtccagcaacgacagaaaaatcgtcgctaagcagaattgatgaagttgatcacgacaatgctcgtcagcgccgctgactccgcgctgccgcgatcactcgcgcggtggtggcaggtgcggcgccaccagggcaagcgtgcgttgcagcgcgccgcggccattgctgaccagcgtgcatcccgcccgcgccatgtcttcgcgggcctgggcatcgtcgagcaggtgctgcagcagatcgcccaccgcctgcgcgtcctcgccgatgagcagcgccccggcctcgcgcatgcgccgggaaatttccgcgaagttgtgcaggtgcgggccggtcaccgccgccgttcccatcgcggccggctccagcaggttgtgaccaccgatggcctgcaggctgccgccgacgaaggcgacctgggcgcaggcatagaacggcatcagttcgccaagggtgtcgatgacgaacacgtcggtggccgcgtgtggccactggtccacgcggcgggtcgccacgctccagccctgttcgcgcgccagcgcttccaccttcgggaaacgctcgggatgtcgcggtgcccacagcagcagcagctccggatgccgctggcgcaggcgccggtgcaggtcgatcaccgcctgctcctcgccatcatgggtactggcggcgatccataccggacgagcggccggtacccgcgcgtggaactgttcgacgaaaccctgcacatccggcgtggcgatgtcgaatttcaggttgcccagcgcctgcacctggccgggatccgcccccagctgcacgaagcgctcggcatcgtcctgcgactgcgcggccacgcaggtgacggtgcgcagcgcgcggcggatcagtgccgccagcaaccggtagccgcgcagcgaacgcgccgacaaccgggcgttgaggatgtacaccggaatgccgcggtcacggcagccgaacagcatgttcggccacagctcggtttccaggatcagcgccaggctgggctggaaatggccgaggaaacggttgacgctgcccggcacgtcgtacggcaggtagacatggtccagggcgtcgccccacagcgcgcgtacgcgctcggagccggtcggggtgatggtggtgatcacccagcggatgtccgggcgctgctggcgcagggcattgaccagcggcgcggcggcattgacctcgcccaccgagaccgcgtgcagccagacccgcggctgcccggtcggctgcggataggaggcatagcgttcatcccagcgccggaagtattcacgaacccggaaaccgcgccagaccaggtggtacacggtgatcggcagcaggatgtagagcacgaccgaatacaggccgcgcaggatccattcgacagggtctttgcgcatgcggcaaggatacgggagcccccggggaaagacacgcggccgccttggtagaatggccccatgtcagatgcctccaccgccgtccgcccatcgctgcgcgatccgcgcaactggccgatgttcgccgccatgttcggcgccttcgccatcgctcgcctgccgtggatgctgcagcgcgcgctgggccggggcgtcggctggatcacctggcgcctgctcggcagccgccgccgcgccgccgaagtcaacctgcagctgtgcttccccgagaaggacgaagcctggcgccagcgcctggtgcgcgacagtttcgatgcgctgggcgtgggcgtgttcgagtgcatccgcgcctggtggggcagcatcgaccgcatccgcccgcaggtacggatcgaaggcctggaacacctgcggcagatggaggctgaaggccgcggcgtgctgctggtctccggccacttcatgaccctggaaatgtgcggacgcctgctgtgcgactacgtcgacctgtccggcatgtaccgcaagcacaagaacccggtgtacgagtgggcggtgaagttcggccgcctgcgctatgccaaggcgatgttcgccaacgaggacatccgcgcgaccgtgcgccacctgaagaagggcggcttcctctggtacgcgccggaccaggacatgcgtggcaaggacaccgtgttcgtgccgttcttcggccacaccgcttcgaccatcaccgccacccaccagctggcaaggatgaccggttgtgcagtgatcccgtacttccaccgccgcgaaggcgggaagtacgtgctgaagatcggcgcaccgctggagaatttccccagcgaggacgtggaagccgataccacgcgggtcaaccaggccatcgaagagatggtgcgcgaagcccccgaccagtacctgtggatccaccgccgcttcaagcgccagcccggcggccggagtgatttctacaaataatcggatgcggtggaagggccggcgtcctcgcggtagtcgccaaccttggttggcgccggatgaaccgaggccggtcccggggagcccaccaaggttggcaactactgcatcggcggagattcgtccgattcgcgggccagcagactgccggcgaacagggccgccagcagcacagtcaggccgccccagaacgcagaatagaacgccaggtgcgtattgagcgggaacacggtaaccgccagcgccagcatcgccgggcgggcgcggtcacgcgccgccggcggtgcatagcgccaggcccgccaggcctgcgccaccgccgccagccacagcagcaggcccagcacgccggtctcggccaggatttccagcacgatctggtgggcgtgcaatgccggttgattgccccacacggcggggccctcgtctgacacgcaggccggatacgcatcacggaagccgcgcgcaccgacaccgttgaccggatgttcctcgatcatgcacaccgccgccgtccagatgcgcgcgcgccccgaaagcgcctcgtcaacgccctgcccgtcttcgttccatgcctgtgccgtgcgcgcaacacgctcgcgcagctgcggcacgcccgctgtcagtgcggccgtacccagcgctgccacaagggccagcagcagcagccgcttccagccgaactggcgcaggccgctgtagcccagcaccagcacaaaggtgatccacgaggcgcgcgaaccggccagcagcagcacgcatcccagtgcggcggcggccagcaaccaccccgcactgccgaaacgccgcgccatcggcagcagcaggaagggtgacaggctggccagcacctggccgaatttcaggttgcagggcccgagcgcgccactgaggcggtcggccagtgcggcttcgtcggccggacacagcgcgtggccacttacggccagcttcaggtgctccagcgaccagaaccatgggctggtgccggccagcgcctgtaccaacgcgtccagcgtccacgcgccggtaatcagcgccaggccaccgaaggtcagccgccgccgttccggcgtggctaccgcgatcgccaccagccacatgaagggcaggtagcgcagtccggcggcagccttggtccacgaggccgccggatcgatcgcatcgatggccgagaacgcctgtggcagccagtagccgaggaacaggatcgaggtcagggcccacgccgccgtgctcaacaggtgcgggcggcgctgcagccggcgcatgaccatgcgcgcggcagcatagagcgcgccaaggccgagcacggtttcggcgatgcctggcaacggccacatcgccacgtacgccagcacccaccagggcgcccagcgcccagcgcggtcgtcgcgcacgatggcagcggggtcagccggcgagatcggcatagaggcggagggtatcgcgctgcatggcctgcagggtaaacgggatgcgggtcggcaaggatggcggctgcgccagcagggccagcgcacgttcacccagcgcgcgcgcgtcgccgagcggcaccgcgccgccgggctgcaactgctgcagcagttcgccgacgccaccgtggtcccagcccagcaccgggcggccgaccgacagcgcctcgaccacggtgcggccaaaggcttccggcttgtccgacagctgcagcaccagatcgctggcggcgtaggccagggcgatgcgtgcggtaggcgtgctgatctgtacggcctcggccacgcccagtgccgcagcctggcggcgcagatcggccacgtaggcctcacgcccgggttcctcggtacccagcatccacagctgcgcaggcacgccggcggcacgcacgtcggccagcagctgcagcgcgtgggcgtggcccttcagccgggtaccgcgcccgggcaacagcagcagcgggccatcaacctgcgccagccagggataatcggcggccagggccagccgcgggcgacggtcggcacgtgctacgcgtgggaactggccgacatcgacaccgcggggaatgacctgcagtttttcttccggcaccgtcgggtagtggcgttgcacgaaggcgcgcacggtattggacacgcagatcacgcgttcgccactggtcatcaccgcactgtagcggctgggcgaattcaacccgtgcacggtggtcacccagtgcgggcgctgtgcggcgggcatggcgcggatcgcgtacaggcccagccaggccggcagccgcgaacgggcgtgcacgatgtccgcaccgacctcggcaaacaggcggcgcagggtcggcagatggcgcagggtcagcagcgacttgcggccgatgtccagggtgaggtgctcggcaccgctgtccagcagcggctgcaccaggcggccaccggcggacaccaccagcgcacgatggccggccgcgaccagggcagcagcgatttccagggtcgagcgctcgacaccgccggagtgcagcgccggcagcaactgcaccacggtcaatcggcgcatcgaaggggccgccgtttagtcggccagcacgaacacggaaccgcagtacgggcactgcgcttcaccgttgggctcgtcttcgatcggcaggtacacgcgcggatgcgagttccacagcgccatttccggggtcgggcagctcaacggcagatcgctgcggtgcacggtgtagcgcttctcggcgttggcgggcgcggtggcggtatggctcatggcggatgtcggtgaacgggttgcgaggcctgtgattctagcatctgggccgcaccgacattgcgccacaaggcctttgcgcgctcccgccgatgcctcgcatctccccgccgcacgccgggcggcggcggcgccggggatttcgcggtcgttccggcaggttcgctcgccagaatcgactccagcgatatttcccgcatttggatcgaactaaatggcacttgccagcgcgcgacggctgttgcaggatcgggccaggtcgcaccccgacccacccaatccaacccgatcgcatggcccgcccccaccggaccggcatcgcctcttccactgccagcctggcgggcggagcgatgctgtccgtggtgtccgccgatgcgggttctgcccgccgccagcccttccgggagacccttgcatgaccctgtccgatccgcgccgcgccctgcttccactcgccctggccctggcctgtgcgaccactgcgatgccggtgctggcacaagggctgcagacctcgttcgagcccggcgaacctgccccgacgcaggccgcgggtgcacttcaggtcacgatcggcaacggccctgcggcgccttacgcggccaagcgcaacgccggctacagcggcctgcatgcactgcgctacagcagcgaaggcggcagcgcgcggcgcgaactgttcaaggccgacctgcccatcgaggccgataccacgctgtcgtggctggtgctgccggagatcgtcggcaaggacaccgtcgcttcgacctatgtctcgctggacctgctgctggacgatggcagccgcgtgtcggccggtgcggcgcgcgaccagcatggggtggcgatcggcgcacgcgcgcagggcgaatcgaagacgctgtacccgcaacagtgggcgcgcaaggcagtgcggctgggcgacgtacccacgctgaagggccgccgcgtggtggcgatcgagctggaggtggccagtgccgagggcgcgccggtctctggctggattgatgacgtgcgcctggacgcacagccgcggccgcagccacagcgcgtctccgactgggtgctgaccacccgcggcacccaggccaacggcaccttctcgcgcggcaacaatttcccggccacggcggtgccgcacggcttcaacttctggaccccggtgaccgatgccggcgcactgaactggctgtaccgctggaacgaacagaacgacgcacagaaccgcccgcagctgcaggcgcttgcgctgagccaccagcccagcccgtggatgggtgaccgccagaccttccaggtgatgccctcggccagccgtggcgtgccggaggccgaccgccgcaagcgcgcgctgtcgttcgatcgccgccatgaaagcgcgcgcccctaccgctacgacgtgcgcttcgacaacggcatcgctgccgccatcgcgccgaccgatcatgccgcgttgttccgcttcgacttccccgaaggcggtgacgccaacctgctgttcgacaacgtcgatgcacgtggtggcctgactctggatgccgccacacagacgctgtcgggctacaccgatacgcgcagcggcctctccaacggcgccagccgcatgtacgtggtggccagcttcgacaagccctggcgcagcagcggccgcctcgacaccgggcgcccgaccggctacatcaagttcgatgccggcagcgagcggcgggtgacgatgcgcatcgccacctcgctgatctcggtggagcaggcgcggcacaacctcgcactggaaatcgccgccgccgatacgctggagagcgtggccggccgcgcacaggacgcgtgggacgcgcgcctggcccgcttcgacatcggcgatgccagcgacgaccagaagaccacgctgtactccagcctgtaccggctgtacctgtacccgaattccggccacgagaacgtgggcagcgccgccgcaccggagtggcgctacgccaaccaggccagcgccagcgatgacaacaccgaaggcagcgcgacccgcagttacgccggcgtgcgcgatggcaaggtgttcgtcaacaacggcttctgggacaccttccgcaccacctggccggcctatgcactgttcacgcccgacgatgccggccagctagtgcagggcttcatcgagcagtaccgcgccggcggctggatcgcacgctggtcgtcgccgggctatgcggacctgatggtcggtaccagctcggacgtggccttcgccgatgcgtggctgaagggcatcggcggtttcgatccggccgaggcctacgccgccgcgctgaagaacgcgaccgtggtcccgcccgaccgccatgtcggccgcaagggcatggaccgttcgaccttccgtggctacgccagcgcggacgtgcatgaaggcatgtcgtggacgatggaaggcgcactcaatgatttcggcatcgccaacatggccgacgcgctggccaagcgtgcgaccacgccggccgcacgcgagcgctacagcaccgaggccgactacttccgctatcgcgccgccagctacacgacgatgttcgatccggccgccggcttcttccagggccgcactgccgatggccagtggcgcgtggacgcgaaggactacgacccgcgcgtgtggggccacgactacaccgagtccaatggctggaccttcgccttcaccgccgcccacgatggcgagggcctggccgcgctgtacggtggccgcgacaagctggcggcgaaactggatgccttcttcgccacgccggaaaccgcagacccggcactggccggttcctacggcggcaccatccacgagatgaccgaggcgcgcgacgtgcgcatgggcatgtacgcgcacagcaaccagccggcgcaccacatcccgtggatgtacctgtacgcagggcagccgtggaagacccagcagcacgtgcgcgagatcctgtcgcggctgtacgtcggcagcgagatcggccagggctatccgggcgacgaggacaatggcgagacctcggcgtggtacgtgctggcctcgctgggcctgtacccgctgcgcatgggcgccccggagtatgtgatcggttcgccggccttccgccacgcgcgggtggaactgcagggcggcgcggtgctgaccgtgaacgcggccaacaattcgcgagagaacgtctacgtgcagtcgctgaagatcaacggcacgccctggacgaagacctgggtgccgcacgagctgatcgccaagggcgcgacgctggacttcgtgatgggcccgcagccgtcgcgctggggcagcggcgtggatgacgtgccgcgctcgctgaccgcccgtggccagcgcccgcagctgctgcacgacctgctcggcagcggcgcgaaggcgacgctggccgatggccgcgccctgccggcgctggtcgatgacgatgcggccaccaccgtcggcctgggtggcggcgcgaccatcgcactgaccggcctgagcaatggcacgccgacgatgtatacgctgaccagcggtgacggccgcatccagggcggcgaatggacgctggaagcgcgcaatggcaacggccactggaccgtgctcgaccagcgcagcggcgaagccttcgagtctgcccgccagacccgtccgttccgcatcgccagacccggtcgttacagcgagtaccggctgcgcctggccgcgccaggccggctgccgctggcggagatcgaactgttggcgcccagcgccgtacaatgagccctatgcgctaccgtctgttgcctctggcccttgttgccctttccttctccagcttcggccagacccaggcctttgatgcgcagctgacccgcgacggcgtgacgctgaactaccaggacgcccgtggcgccctggccgcgccgcagcgcaagcgggtgatcgatacgttctacttcgcctacctgcgcgaacgtgcggacttccacccggccgcgccatcgatggtgcgcatcgtgatcgatccggcctacaccgggatcgccttcgtcggtgacaaggaccaggcggcaacgatcaccatcaatccgggttggctggcgcagcaccccaacgacatcgacctggtcacccatgaggccatgcacatcgtgcagggctatccgggccatggcgacgcacgggtgccgggttggctggtggagggcatcgccgactacgcacgcgaccgctacggcatggacaatgccgccgcgggctggtcgctgccgggcaaggtcgagaagggtcagaacttcgacagcggctaccgggtcaccggtgcgttcctgaaatgggccgacgccgaacacccgggcctggtgctggcactggacacggccctgcgcgatggccgctatgcaccggccctgtggcagaagcacaccggcaaggcactgcccgcactgtgggcccagtacgccaagccgcggtcggatgcaccgccgccggcccctgcacgccgcggcaagcggcgctgactggctggtcaactgggaattggggcgactgggtagagtcgactgttagtcgactgactttcgtacagcccccgaaaaccccgcgcttcgcgcgatagtcgaccaacggtcgactctacctcgctgctttctacgcctcagcgcgactgcacgaaaccggcgtacagcgcgaacagctgctggaaatatcgccgcgtgactcgattacgcatgacaccctcgcccatgaaagttggtcgggcccagggtgggaaggccggtccggtaccttcccacggccgggccgcgtgggcgtattgggccgcaacggcgttgcagggaaatgaccgggcggcgtagcgcgtgtggcaggttcggcggccgttgcggcaaatgaaaacaccgggcaatgcccggtgttttcacttgcgccgacgtccagccgcgccagcgccatcattctcccgaccaggagccccttcttgttgaaggggcgcgccgaaggcgggggtagaggaagaatgcgtgggcagcggaagtgggaaagaaggcttatgccttcttttccgcttccagctgcttgcggatctgcgcatcgaccgccgcgatcgcggtcatgttcaggatccggcgcgaagtggcgctggtggtcaggatatgcaccggcttgttcacgcccatcaggatcgggccgatcgccacgccatcggtgaacacgcgcaccaggttgtaggcgatgttggccgcttccaggttcggcagcacgaacaggttggcgcggccctgcagggtcgagcccggcagcagcttctggcgcagcgcttcatcccatgcggtgtcgccttgcatttcgccgtccacgttcaggcgcgggttgcgcttgagcagcagctcgcgcacctggcgcatcttcagcgcgtccttcgaatcgtggctgccgaagttggagtgcgacagcagcgcgaccttcggctcgatgccgaacaacttcatgcggtaggccgcctgcagggtcgcttcgcacagctgctcggcggtcgggtcttcctgcacgtgggtatcgacgaagaagaacacgccctgctggttgatcacgccggtcatcgccgaggtcgaggtgaccttcggctccagcggcagcacgctgcgcacgtagcccagcttcttgtggaagcggccgacgatgccggtcagcatcgcatcggcttcgccacgcgccaccatcactgctgcgatcagggtcgggcgcgaacgcatcaggttcttcgccgcggccacggtcacgccacgacggccggtcaggccatggtagtactgccagtattcgttgaagcgcgggtcatcgttgatgttggtgacttcaacgttctcgccgatcttcaggcgcaggccgaggcgttcgatgcgcgactcgatcacttccgggcggccgatcaggatcgggtgcgccaggccgtcatcgaccacgttctgcaccgcctgcaacaccacttcctcttcgccttcggcgtacaccacgcgctgcttgtcgctgcgcgcgcggtcgtagaccggcttcatcatcaggctggtgcggtagacgaactgggccagcttgtcgcggtaggcgcccatgtcgtcgatcgggcgcgaggccacgcccgaatccattgcggcctgggccacggcggccgacagctccaccagcaggcgacggtcgaacggacgcgggatcaggtattcacggccgaagctcggggtgtcaccgccataggccgagcccatgtcggtggcggcgcggcgggccagtgcagcgatggcacgcacgcaggcgatcttcatttcctcgttgatcgcggtggcgcccacgtccagcgcaccacggaacaggtacgggaagcacagcacgttgttgacctggttcgggtagtccgaacggccggtgccgatgatcgcgtccggacgggcggcgcgcgccagttccggcatgatttccggggtcgggttggccagtgcgaagatcaccggatccggcgccatggtcttgaccatgtcggcggtcaggatgcccggcgccgacaggcccaggaagatgtccgcgccgtcgacgatctcggccagggtgcgcttgtcggtgtcgcgcgcatagcgctgcttttccggatccaggtcggtacgaccggtgtggatcacgccctcgcggtcgaaggccaggatgttttccggcttcaggcccagctgcaccagcatgttcacgcaggaaatgccggccgcgcccatgcccgtggtcgccagcttcacgtcctcgatcttcttgccggtgatcgccatggcgttgagcaccgccgcgccgacgatgatcgccgtgccgtgctggtcgtcatggaacaccgggatcttcatgcgctcgcgcagcttgcgctcgaccacgaagcattccggcgccttgatgtcttccaggttgatgccgccgaaggtcggttccagcgaggcgatgatgtcgaccagcttgtccgggtcggtctcgtcgacttcgatgtcgaacacatcgatgccggcgaacttctggaacagcacgcccttgccttccatcaccggcttgccggccagcgcgccgatgttgcccaggcccagcaccgcggtgccgttggagatcaccgccaccaggttgccgcgggcagtcagctcgctggcctgctgcgggtcggccttgatcgcttcacaggcgtacgccacgcccggcgaatacgccagcgacaggtcgcgctgggtcagcatgggcttggtagcggaaaccttgatctttcccggcggggacatccggtggtaatcgagggcggcctgtttgaaatcttcgttggacatcgatgtgggttacatgaatgggcagaagggacaggggatgatacccccgttggagcgtctggacctgtcgctatcctgtcgcaagcatgctgcgaccgcacaattccgtgccgtatgcgacagtaccgcgatgtcagcttcggcgttgcccatgacagccatgggacgccctgaaacgccgcggggccgtaccactgtcgtgaccggccccgcggtaccacacacctggatcagcccttggccggcagtgcctcgggcagcgcatcgaccggcggcggcagttcgctttcgcggccatccagcgccagcttcaggcggttgcggtccagcgcgccttcccagcgcgagaccaccacagtggccacggcattgccgatgaagttggtcagcgagcggcattcgctcatgaagcggtccacgcccaggatcagcgccatgccggccaccggcacttccggcacgacggccagggtggcggccagggtgatgaagcccgcgccggtgacgccggccgcgcccttggagctgagcatggcgaccagcagcagggcgatctggtggcccagggtcagttcggtgttggtggcctgggcgatgaacagcgccgccagggtcatgtagatgttggtgccgtccaggttgaacgagtagccggtcgggaccaccaggcccaccaccgacttgctgcagccggcgcgttccatcttctccatcagcgacggcagcgccgactccgacgacgaggtgccgagcaccagcagcagttcggccttcaggtagcgcgccagcttgaacaccgagaagccgcacaggcggcagaccacgccgaggatcaccgccacgaacaggaaggcggtgaggtagaacgagcccaccagccaggccaggttgatcagcgagccgacgccgtacttgccgatggtgaaggcgatcgcaccgaaggcgccgatcggggcggccttcatcaggatgtgcaccagcttgaacaccggagcgaccagcgcctccaggaagttcagcaccggcttgcccttctcgcccaccatcgccagcgcgatgccgaacagcacggccacgaacagcacctgcaggatgttgccgtcgacgaaggcgctgagcagcgtcttcgggatgatgtccatcaggaagccgaccagggtcaggtcgtgcgacttctcgacgtagctgtgcaccgcggtctggtccagctcggccgggttgatgttcatgccggcgccgggctgcaccacgtgcgccacgatcatgccgacgatcagcgccagcgtggagaagaacaggaagtacgccatcgccttggcaaagacccggcccaccgtacgcaggtgggtcatgctggcgatgccggtgacgatggtgaggaagatcaccggcgcgatgatcatcttcaccaggttgatgaaggcatcaccgagcggcttcatcttctcgccgatcaacggctcgtaatggccgaggatggcgcccaggacgatcgccacgatcacctggaagtacagctggcgatagatcggcaacggctttgcaggcaccggtgctgcggtcgggatgtgcatggcggactccggaaggggcgttttcaggcacgtacggccccggagctgcacgggaaccgttaccgtggaaactgatcgcaggccctgtgcagcacgcacaggaggtgcgaccaatggacgcctttgtacgcgccaggcacgccagcgcagataacctattggtactagcctcccggttcaggtggcacaggtgcctacactggcgccgcaccgcccgatcctggggaggctggtggcccgggctgaacggctgggtgagtctttgcgaaagttccggcccttgcggccgttgatgtcctgtccacacgcaatctgagagagccgcacccaacatgcgcccgaatcccaccttgctggccctgtcgctggccgcccttcccgccttcgcctcggccgccgatttcgacaactggccgaccaggtacaccttcggtgatggcaccgagctggcggccaccgccaacatcgcctacgactacaacgacttctcctcggccagtggcctcgaggacgacgatgccgtgcgccgcaaggaattcggcgcgacgctgaaaaagaagggcgtctacgatgcgatggtctactacgacttccaggccgatacctggctggacgtgttcgtgcgcttcgagagcaaggccttcttcggccgtgacgtcggccgcttccgcttcggctacatgaagaccccggtcggcctggatgcgaacacctcttcgcgtgccggcagcttcctggaaacctcgctgccggtgcaggccttctacgaaggccgccgcaccggcgtggagtgggtgctggagcgcccgcagtacctgctgcaggccggggcctatggcggcaaggacctgcagggcgacaaccccggcaccacccaggcggtgcgtgcggtgtggacgccggtgaaggcaccgggcgatgtgatccacctgggcctggcctactcgcaggaaaacccgcgtggctacagcgatggccgcgacgtgcatcacgaggccagcgcccgcctgcgcgcgcgcccggaagccggcctgaccgacatccgctacgtcgattccggtgcgctggtcaccgccgaccagatccgccgcaccggcctggaaggcatctggatccggggcccgttctcgctgcaggccgaagcgctgcgcgctacggtcacccgtcgtgacggcaagcccgactacaccggcagtggccagtacgcgatggccagctgggtgctgaccggcgaatcgcgtccgtacaacgccggcgcggtggccaacatcaagccggcgcacaactacggcgcggtcgaactgctggcccgatacagccgtctcgacctggacgatggcagcatcctcggcggccgccagcacgacctgacgctgggcgcgaactggtacctgaccagccacttcaagttccaggccaactacgtgaaggtcgacgccagccgtcgtggcgtgcacagcacgccggagatcttcgaactgcgcgcgcagatgcacttctgaccccttccacgtcagaccccggcgggcgtgcacgccacgcccgccggccctgcgtagactgccgccatgtactggctcagccgccaccggatgctgttgctgaccctgctggtgatggtcggcggtaccgtgctgtgcgcggtcgccgccggtcattacgcctggcggcgcgcgctcggcgaggaaagcagccaggtgcaacgccagctgcagctgtatggccagggcctgcaacagcgcatcgaccgcttcggcaccttgccgcaggtgctggcacttgacccggatctgctgcatgcactgcgcgtgccgccctcgcccagcgaacggcagcggctgaacctcaagctgcaacgcgccaacgaagtcacccgtgcctcgaccctgaccctggtcggccacgacggtgtggcggtggcggccagcaactgggaccagccgaccaccaacgtcggcgagaactacagctaccgcccctactaccgccaggcgctggcgcagggccgtggccgcttctacggcatcggcatgaccaccggcgtgcccggctattacctttcgcaggccatcgaagaagacggcaagcggctgggcgtggtggtgatcaaggtcgagttgtccgcgctggaacaggaatggctgagcagcccggacgtggtgctggccagcgacgaccacgacgtggtgttcctggccaaccgggacagctggcgctaccggctgctgcgcccgctgggagccgatgagcgccgcgagatgctggacgcccgccagtacgccgaccgcgcattgcagcccctgcgcgcacgcaccgaagacgtgctggccgatggcggccgcatggtgcgcctgctggatccggcgctgccgcagccgatgctgtggcagagcctgccgctgcccgccgaaggctggaacctgcacctgctgcacgatgccagtgccgccaccggcgccggccgcgccgcagcactcaccggtggcgctgcatggctggcgctgggcttcctggtgctgttcgtgcagcagcgccggcgactggccaagcatcgcctgcgcagccgccgcgagctggaaaccctgctcaagcagcatgcacaggaactgcgtaccgcgcaggatggcctgctgcaggccgccaccgatgccgacagcggcctcagccgcagcctcgaacacctgccgcagggcgtggtggtgatcgaccgcgaactgcgcctggtcgcgtggaattcgcgctatctggaactgttccgtttcccgcaggacctggttcgcgtcggccggccgatcgaggaactgttccgcttcaacgcacgccgtggcctgcttggtccgggcccggtcgatgaagccatcgagcgtcgcctgaaccacctgcgcagcggccgcccgcacatgcgcgagagcgaaaaagacgatggcaccgtgctggaaatccgcggcaacccgctgcccgacggcggcttcgtcaccagctatgccgacatcaccagctacaagaacgccgcgcgcgaactgcgctcgctggccgatgcgctggaacaccgcatcgccgagcgcacccatgacctggaagaagcacgccgcgaagccgagcaggccaaccgctacaagacgcgattcgtcgcctcggccgtgcacgacctgctgcagccgctcaacgcggcgcgcatgttcgtctcggtgctgcgcggcaagctgggcgacccggcgcagcagcagactgcggaccacatcgatgctgcgctggccgcgcaggatgcgatcctcaacagtctgctggatatcgcgcgcctggaatccggcagcctgccgacccgagtgcaggcgttccggctcgggcctttgctgcagacgctggcgcgcgaattcggcatcgccgcacagtcgcgtggcctggtggtcgactgggtcgataccgatgcggtagtggtcagcgatgaagccctgctgcgccgaatcctgcagaacttcctgtccaacgcgctgcgctacagcgaacgcggccgcgtgctgctcggctgccgtcgccgtgaaggcatgctgtggatcgaggtgcacgaccagggccccggcattcccgacgcattgcagggcgagatcttcgaggagttccgccgcctgcacgacggccagcagcgcggcgccggccttggcctggccatcgtcgatcgcatcggccgcctgcttgggcatccgatccggctgcgctcgcagctgggccagggcagcgtgttcgcggtgggcgtgccgttcggcgaagccagcgcgattcccgctactgctcctgtgccggtgctggtgcaggaaccggcagcggacaacccgcttcgcggtcgccgggtgtgggtgatcgacgacgatccgcacgtgtgcgcggccagccgcgcgctgctggagcgctggggctgcgaggtggcgctggccgatggcccacaggcggcgctgcagctggcagcaacaggcgcagtaccggagctggtgctgctggatgtgcgcatgggcgatcaccatgggccggtgctgtacgagacattggccgaattgtggcaggcccgcccgccggtagtgctggttactgccgagcgcgatgcgggattgcgtgagatggccgccgaacgcggctgggggatgatggccaagccggtgaagccgccggcgctgcgggcactgatgagtcagttgctgatccgccatcgcgggtagtttccagccaacggcgcagcccctcgtgggtggtgtctgggtggtcgcggaaagcagaagccgcgggtgggccggtcgggttgggtacgcgggggacgccgtgaatccgtccctggaggcttggcagccgcttgctcgtgtgcgctgtcctgcgcacacggcaagacccgggttgggcgtcctgcccaacccgcccgaggcatgcctcgggcccatgcggctgacacccccgcgcacccaacccgaccggcgtccgacagatttcggtggcctgcacccacggagaagaaaataagatcaaaagcgggtcgcgcgctgcgcttgctcgtgtagagccgagcccatgctcggcttcacggaccggccagaaagcagccgagcgtgggctcggctctacaaaaagcggcctgtcaggctgcctttgcttttgatcttcttttctcttccgtgggtggatgcgcacggaacctgtccgtggccgggcaggtgggctgcgcaggggcgtgagccgcatggatgcggcgaccgagcttacatggatgtacttgcagcggcccctgtgcagtccacctgcccggcctcacccatgaactgctctacgtgtccacccacgaggggctgcgccgttggctggaaactacagcccgatgccggcgtcgccctcgggctccagcgccttcaccagcaccgccgcctgtgtgcggctgtggcactcgagcttcttcaggatggcggtgacgtgcaccttcaccgtgttctcggccagccccagggtgtaggcgatctgcttgttgagcaggccatcggccaggcagagcagcacgcggaactgctgcggggtcagctgggccaggcggctggccagtagtgcatcggcctcggaacgctcggcggccatcgccgggaaccacaggccgccatcgagtactgcctgcacggcctccccgatggtctcggccggcgcggacttcgggatgaaaccggcggcgccgaactgctgggcacggcggatcacccgcggatggtcgttggaggaaaggatcaccaccgggatgtccggatgcgagccgcgcacgtgcagcagcgcggaaaaaccgtgcgcgccgggcatggtcaggtcgagcagcaccaggtccacgtccggctgtgcgtcgagcgcctcggccagcgcatcggcactggccacctcgcgcacctgcgccagcggcaggctctgccgcaaggactgcaccaccgccgaacgcagcagcgggtggtcgtcggcgatcaggatggtgtattcgctcatgccgccattgtacgggcaggccggagcctcagcgccccgccggctcgacgctgctgcgccaggcatcgaggaactggcggcgcttgagcgcatccaggtacaccagcaggcccgggccgagctggatcggacgccggctgcggccgggcgcatcgtcgccacgtgcgttgccggtcacgatcggcatcagccgcgcctcgcgcgacagcacctgctggccacggggcgacagcaggtagtcgaggaagcgccgcgcttcttccgggtgtgggccggtacgcggaatcaccgcggtgcgcagcaccaccagcgtgtagtcctcaggctcgacgatggccagtggcgcgccggcatccacccgtgcctgcgcgtaggaaccaagcacgttgtagaccagcgacagctcgccgctggccaccttgtccagcagcacgccggtgcgctcttcgcgcactacgtcgttgtcgccgagcgcccccagcagcgcgccggcgatgctgccgcgctgcgcatcctgggttgccagcaggtagccgacactgctgcgctcgatgtcataggtgccgaccctgccgcgcagcggtgcaccttcggcacgcagccggtccagcagctggcggcgcgtgtgcggcacctttgccgaaggcattgcgcgggtgttgtagaccatcaccaccggctcgtagctgatgccgaaggcctcgttgcgccactgcgcccaggctggcagcgcagcggtcagcgccgagcgatgtggcagcgcgtggccatcgttgaccagcttggtctgcaggtccatgccgctggagatcagcaggtccggcgatgccggtccaccgcggtcgtgcaggtaacgcgcgtacaggtcctgggtgatgatgtcctcgtacaccacctcggtgcccgggtgcagccgctggtaatcggcaatcaccaccgcgaacacttcgatgtcggtagtgccgtgaatgcgcagctgcgcggtggccgccccctgtgcgggaaaacgacgcacatcgccgggcgcggccagcaccggcagggccagcagcagggcaacggccgtggcaaacaggcggatcatggactgctccgtggcaggcggatggtggcgatcagcccgccctgcgggcggttgctgaggtcgatgcggccgccgtggctgtcgaccacccgcttgacgatggccaggcccagcccggcaccgccggatggcgcgccttcgccacgcgcgaagcgctcgaatacgcgttcggcatcggcagccgcgatgcctgcgccatggtcggcgatggtcagcacggcctgcccgctttccacggtcagcgcgatctgcaacgggccgtcgccgccgtacttcaacgcgttgtcgaccaggttcttgattgcctcgcgcagcagcagcgcgtcgccatgcacctgcaccggctcggcagtcatcgccagttgcacgcgcggtgccgggcttgcctgcggcagtgcttcatgcaacgcctggtgcacggtctcggccagatccaccgccgcaaagcgctgcaggtgcgaacgatggatcacgctggcatcgctgagcagctggttgagcagccggctcatatgcgtggcgttgcgctcgatcgcctgcaggctgcgtcgcatgtcctccggatcgtcatcatccagcgccaactgcgcctgagctcgcaatgccgccagtggcgtgcgcatctggtgtgcggcctcggccatgaacgcgcgcagtgtctcgttgctgctggacaggcgttccatgaagcggttcaacgcggccaccatctggtccatctcgcgtggcacgcgggcatcgagcggcttcaggtcggacggctcgcggcgcgacagctcgcgctccacccgcaccagcggccggaacgcacgatgcacgccgaacgccaccagcgccagcagcagcccggacaacacaccgatcgccagcaatgcacgattgaccatgtcctgcgcaacggcttcgcgcgcgcgccgggtctggcccacctgcacctgcacctcgccctgtgccgaggccgcggcgaaactgcggccgaccaccacgaagcgcacggtttcgccgctgtagggggcgtcgaacagctgcggctgggtaccgggcctgcgcggcggtgtcggcagatcaccgtagccggtgatcagcgtgccgcggctgtcggccacccggtagaacacgcggtcctccggcgccatcgccagcaggtccagcgccgcatagggcagatcgacctgccactggccgtcgaccagggccaccgaatcggcgatggacagcgccgaggacaccagcaggtgatcgtaggatcggttggcggcgcgctggccgtaatcgcgtgcggcgaacagcagggccaccgcgaacaccgccagcagcacgccgaggtagagcagcagcgtgcgccgcagcgaacccggcgccgcagtcgcagcacgcgtgtcagccatcggcgtcggcatgggtatcgctggcttccagcaggtaaccgacgccacgcaccgtggtgatgcgcagcggcgcgcccgccagcttctttctcaggcgaccaacgtacaactcgatggcattcgggcccgcttcgtcatcgaaaccaaacaggccgttgccgatctcgtccttgccgaccacctggccaagacggccgaccaggatctccagcaggcggtactcgcggttgggcagttcgatcggctccccgtcgaggctgacccggtgcgccgcgttgtcgaactggaagccgccaatctgcaccacttcgctggcctggccgcgcgcacgccgcagcagcacgcggcagcgcgcttcgaactcgcggaaatcaaacggcttgcccaggtagtcgtcggcccccacatccagcgcctgcacgcgatcttcgatgccgtcacgcgcggtcagcatcagcaccggcgtgctgtcaccgcgctcgcgcatgccggccagcacgcgcaggccatcgagcttgggcaggccgatgtccagcaccaccaggtcgaagctctggtagcgcagcacgctggcagcggccaggccatcggcctgccagtccacggcgtgcccgctgcggcgcatccggcggatgatcgcatcggccagatccggattgtcttcgaccagcagcaggcgcatgggcactcgggtgggaggggaaccgaatgctaccgcatgccgccgctgggctcgccgggcgcggcacggcgagcccagccgcctgtgcttttcgctgcaccgcacaatccgttgacaggacgatgacagcttgcccgacccagactgcggccgcgcaccgtccggtgcccacgattgccgcgcgcctggcgcgcacctgggagggtttgtggaattcacgtttgcctggcggcgtcctgccgccatgatggcgctggctgcgctgtcggtgccggccttcgccgccgaagacgaccgtccggtcaccgccaccctgggtggccgcctgcacctggacttcgccaccttcgacaacgacaaccgcggaacgccgaacaaggatgacaccgagatccgccgtgcatgggtcgatgtgtctggcaagttcttcgtggtcgactacaagctggaagccgacttctccggcgaccgcgtcgaggccaaggatgtctacctggcccgcagcttcggcaaggcgggcaagctgaccgtgggccagttcaagcagtatttctcgctggatgaccgtaccagctccaactacggcagcttcctggagcgcggcaacgccggcaccacgctggcgccgctgtaccgcctgggtgcgtcctggcaggccaacccgggcgacttcacctgggcggccagcctctacagcctggagagcatcgacgcctggcaggtgaagggtcgcgcggcgggtggtcgcatcacctgggcgccctcgcccagcgacggcgacgtgctgcacctgggcctgtcgctggcccgcgaggcgtacgacaaccccggcgccaatggcgtgcccggcctgcgcatccgcccgcgcccggccggccacctgtccgacgagagccgcctgaccctggtcgacttctccgccggccgcgataccgacgtcaacaagtggtcgctggaatacgcgcaggtgcgcggcccgctgtcgtggcagggcgagttcagtggcgccaccttcgatgacggcgcccagcgcggcgacgtgatggccgcctacggcatgctcagctggttcgtcaccggcgaaagccgcgcctatgaccgcaagaccggacgcttcgcgcgggtgaaggacatccggcacaaggccggtgcattcgaagtggcgctgcgctacgaccagatgtggggcgcgcagcaccttgatggcgcgccggacctgcgccgcggcagcaccgaagcctggacgctgggcggcaactggtacctgcgcgacaacctgcgcttcatgctcaacgtgatcgaaagccgcaaccgcgaccgcctggccggggtcacggtggaccgcacccgcgcggtcaccggccgcctgcagtacgacttctaggcctgccattccgggcgcgcggcgcccggccccttccactccccacgtcctgttttcgcaaggagtccgcagatgatgctgagcatcctcggctttggcatggtcattacgttcatgtacttgatcatgagcaagcgcctgtcgccgctcgtcgccctgatcaccattcccatcctgttcgcgctgatcggtggcttcggtgccggcatcgacgagatgatgctggagggcatcaagaagatcgcgccgaccggcgtgatgctgatgttcgccatcctctacttcggggtgatgatcgatgccggcctgttcgatccgctggtgcgggtgattctgcgcttcgtcaagggcgatccgatgaagatcgtgcttggcaccgccgtgctggcgatgctgatctcgctcgatggcgacggttcgaccacctacatgatcaccgtctcggcgatgctgccgctgtaccagcggctgggcatgaacgcgctgaacatgacctgcgtgaccatcctcgccggcggcgtgatgaacctgaccccgtggggcggcccgaccgcacgcgcggccactgcgctgcacgtggacccggccgatgtgttcgtgccgctgatcccgtcgatggtgatcgcctgtgccggcgtgctgctgctggcctggtacctgggcctgaaggaacgccgtcgcctcggcgtggtgaccctgcccaagggcggcagctggatggacaacagcgtgtccgatgacagcaatccgctgccgaccgtggaagacgccgaggacatcaagcgcccgaagctgctgtgggtcaacctggccctgaccgtggcgctgatgaccgcgctgatcatcggcgtgctgccgatgccggtgctgttcatggtcggcttcgccatcgccctggtgatcaactacccgaacctggccgagcagcgccgccgcgtggtcaaccacgccggcaacgtgctgtcggtggtgtcgctgatcttcgccgcaggcatcttcaccggcatcctcaacaacaccggcatggtcgaagcgatgtcgcacagcttcctggcggtcattccggagtcgtggggcccgtacctggcggtgatcaccgcggtggcgtcgatgccgttcaccttcttcatgtccaacgacgcgttctacttcggcgtgctgccgatcctgtccgaggccgccggcaactacggcattactccggtggaaatggcgcgcgcctcgctggccggccagccggtgcacctgctcagcccgctggtgccgtccacctacctgctggtgggcctggccaaggtcgaattcgccgaccaccagaagttcaccctgaagtgggccatcgccatctcgatgctgctgatgatcggcagcctgctgttcggcctgtatcccctcgccgcctgaccctttgccaaggagccttctgcaatgacgcttcgaatcgcttacgtcaccagtggaatgggcagtgtcggcactgccatctgccagagcctggcccgcagcggccacaccgtggttgccggctgcgcgccgaactcgccgcgcaaggccaactggctgcgcgagcagcgcgaacagggcttcgacttcatcgcctccgaaggcaacgcgaccgactgggcctcgaccagcgccgcgttcgccaaggtccgcgccgaagtgggtgaggtcgatgtactggtcaacaactccggcggcagccgcgacctgctgttccggcagatgacggtggaggactggaacgcggtgatcgcctccaacctcaacgcgctgttcaacctgaccaagcaggtggtcgacggcatggccacgcggggctggggccgcatcatcaacatcggctcggtcagcgcccacaagggccagatcggccaggtgaactacgccaccgccaaggccgcgatgcatggcttcagccgtgcgctggccgccgaagtggcttcgcgcggcgtcaccgtcaacacgctgtcgccgggctacatcgccagccaggcgatcagcagcttcccgccggatgtactggaccggctggcggcctcggtgccggtccgccgcctgggtcgccccgaggaagtggccggcctgtgcgcctggctggcctcggatgaagcctcgtacgtgaccggcgccgactatccggtcaacggtggcctgtacatggggtaagccagtctccacgctgcgcgtggaccgcctcccccacggagtgcgcggggccggtgaacctttgcttgcgaagggaatccggccccttttttcatccggctgcgggacctgcgcgggtgccctgcaccattcgttggttttccgtaaagaaggtttcatgttccgttcgcatagtggccctgcaccgcgcacgcgtgccggtgatcacctcccatgcaacggaccaccatgcagacccgacacctgacgatcgccgtagtgatcgtgctctccgccgctgccagcgcccatgccgccaccaccgccgataccggcgccagcaccgatgccgcgctgagcgcgcagacgctggataccgtctctgtgatcggtcagggcgagacccgccaggtgcagcgcatcactgccgtggacaagcaggtgctgccgccgggcaccagtggccagaagatcctcgatcgccttccgggcgtgtcggtgcagtccaacgatgcctttggcgccaacgaggaatcgcagaccatcagcctgcgtggcttcgacaagagccgcctgggctacacgctggacggcatcccgctgggcgacaacagctacggcaattacaacggcctgagcatcgcccgcgcgatcatcgccgagaacctggccggcgccgaactgtcgcagggcattggttcgctgggcgtggcctcgaccagcaacctgggcggcaccatccagtatttctcgatggatccgtccaccgaattcggtggccgcgccagcgtcaccgtcggcgacaacaaccagcgccgcggctacctgcgcgtggacaccggcgacctcaacggcttctcggcctatgcgtccggcgtgcaccaggaccaggacatgtgggccgcgccgtaccagaaccagaccacccgccagttcaatgccaaggcagtgtggaacgttggcgaccaccgtttcggtgcgttcgtggcgacctcgcgcgccagccaggccaactatgcctacctgtccaaggacatgctggcacgcggactgggatatgactggaacatctacgcgccggactgggatcgcgccgtcgccgccgcgtactgcgcgcctggcacctacaacaaggcgcgctgcaagttcagcggcggcgtcaacagcatcgacgatgcgtactatcagagccgtgcgctgcgcgacgacaacctgtactcggtcgatgccgacctgcgcctgggcgagcagggccgcctgaagctgctggcctaccaccacgacaaccgtggccagggccactggtgggcaccgggccagccgtcctacccgggtaccgacaggatgctgccgatctcgatccgcagcaccaactacacgatcaaccgcgatggcctgaccgccgcgctgtcgtggacggtgggcatccacgagctggaagccggcctgtggtacgagcagaacgaccataacgtgtcgcgcaacttctactacatcagcggcccgttcctggacgatctgtacctgaagaaccccgaccgcctgctgttcaaccaggacttcgacatccgcacgcgccagttctacgtgcaggaccgcatgcgcttcctggaccagcgcctgaccgtagacgtgggcatcaagagtcccaacacccgcatgcgcgccaccgcgcagcccggcgttgaaacccgcattgcgtcgggcacgctgaccgccaaggaatcggtgctgccgcaggtaggcctgggcttcaagctcaacgccaacaacgagctgttcgcctcctacgccgagaacatcgccgccttcgtcggcggtggcagcggcggcccgctgcaggtgtcgccggaatcgttcgcggccagcgccgggctggagccggagaagtccaagagcctggaagccggcttccgcactttcggtgagaagtaccaggcctcgatcgctgcatacaacgtcaagttcgacaaccgcctgctgtcgctgaacccgtgttcgagcatcgaagtcggcacgcgcccggagtgcgtgacgcgcttcatcaacgtcggttcggtgaagagccatggcgcggaactgactttcatcctcaagccgattgatggcctgcagtggtacaacgcgctgtcctggaacaagaccacctacgaggatgactacacctcgggcggggcgatcgttccggtggccggcaagatcacggtggatacgccgcagcgcatggcctccagcgagatcagctggaaccgcgacggcttcttcgccagcctgcgtgcgaagtacaccggcaagcgctactacacctacaccaacgaccagtcggtgccgggcgtgaccaccttcgacgccggtgcgggctacgatttcggcccgggcctgggcctgcgcaacgtgcgggtgtcgttgaacgcgaccaacctgaccaacaagcgctacgccggccagctgagttcgttcgcaccgaccgatccgaagggcacgcgctatgcgatccatgcgagtgcgccgcggcagctgttcatgacggtggcggcagagttctaagtcagaagcgggcgctgcggcgcattgagtgttgctgtatggcgcaggtaggcaggcccatgcaggacacgccgtaaacccgtccttgggggctcgatggcgccatccatggcgccaacggtcctgcatgggcctgcctacccgcgctcgacaattcccagcgccggcgcggaggcaatggaaagcaagagcaaaagcaaagagccgggcattgcccggcgctttgcttttcaagcttttcaaacgcaatccctctggtggacctgctgccgcgcccgcaggaaattgtctggaggaggcggggcaccctggtcaggaccgttggcgccatgggcccgaggcatgcctcgggcgggttgggcaggacgcgcaaccccggtcttgccgtgtgcgcaggacagcgcacacgagcaaggcgccatcgagcaccatggaggggcttttgcgtgtcctgaccagggtgccccgcctcctcccagccgatagcaggcaggcgcaggaggatccgccaacgcatttcattccggcgccagctggtccatccgtatccggttggcgaacagcgagaacgccagcatgccggccaggccgttcgcccggctcacccaatgcggcagccagcgcggcggcttcagcacccccgcctcgaacagcggcgcgaacgcgatcgcatcggccaggctcatcttgccggcgaacaaccagcggcagacctgcaggcggtcctcggccagcatgtgccggaagaaggtgtgcaccgataccaggccgcgcaggtacaccgtgtccttggtgaaggccaggccgccactcggcggcacgccacggaacacgcgctgggccgaggcgaaactctcttccgcgttctgcccggcatcgcagaaatagcggaacacttcgatgaaatcagcgccttcgcgtgccatcgcaatcgcttcggtacgcaggctgatgcgtttcaggcgctcgatgtcgatgctgccggtgatctgctcggcgaaggtcgccaacccttcctgggtcgccgttacccgtggcgaggacaacgccaggctcggcagtaccggctggccgcggccattcaatgcggtcagcgaatgcaccagcgcttcgtggtggaacaactgcgcgcggtcgtaggcgctgaagcgcgcgctggtgcgcaggcggatgcgggtcgggccggcggcggccttggacaccagctccggatccagctgcacctggatgatgcgcgattcgaagaacgcatccagatcattctgcagctgcagctgcagggcgatggccgagaccggcacctgctcttccggcgccagcagttcgtggtccagttcggcggcaatctgtatgaagtggcgcgccgcgtcgcgcgtgctcgggccattgcccggcagcggctgctcgggggcgccgaacagctgcaccgaacaggtatcaacggcggcggtgcccagcccttccagcagctgcgcggccaggtcccagctctgcgctgactgctgcacgtagtggccgagtggatggctgtcgtcgcagtcggcagcgatcgcggccagcgcgcgacgttcttcgctgaagtccagccgtgggtaatccaccttcggcagcaccggctggccacgcgccacgctgtcaaggaacggtgcctgcagcgtggccggccagctggtcaggcccagcaggcggatgcctcccacggcctcgaccaggcgcgcatcgagcgctgcatggtgggccacatcacggtccagcgtcgcagtcggttccatgcgcggactataacgccctgccgtgcccggcgcggtgcgccgccgcccgagcattggctcgggcgctacatgaaatgactccaccgcggaccagctgtagagccgagcccatgctcggctgccttgttaccgcctacgcggcttgcctgccgggcggaactgctggcccttgcctttcctgccgccgcgctcctgcgcggtctcggcctggcgtaccgccagcttggcggcagcggcagccacttcttccttcagcttgaagtagttcagcagccggctctcttcgatctcgcccgcctcgatcgccgcccgcaccgcacagcctggttcctgctggtgcttgcagtcgttgaaacggcactgtgcggccagcgcctcgatgtcggcgaagccaccttcggacagcgtctcttcgccggtcggcttcagctcgcgcatgcccggggtgtcgatcaggcaggcgcccgtcggcaacggcatcagcgcgcggtgggtggtggtatggcggccacgcgaatcgttggcgcgcaccgcgttggtcttcatccgctgctcgccaagcagggtgttggtcaacgtggatttgccggcaccggaggaaccgaccagcaccaccgtgcggcccgggcccagccacggttgcagcaccgccacactgtcggcatccaggccgttgatcgcatgcagcgcgatgccctgcatctccagctcttccagcaccgccagcgcatcctcgctgtacttggtctggtcggccttggtcagcaccaccaccggttctgcaccaccaccgccgaccagcagcaggtagcgctcgatgcggcgcggattgaagtcggcatccaggccgcagacgatgaacaccgtgtcgatgttggccgcgatcacctgctggtggtagtgctcgccggcggcgccacgcttgatcgcggtgcggcgtggcagcagcgcgacaatgcggatgccgtccagcagcacccagtcgcccactgcaggccgctcgtggctggggaagcgcgggcgctgccattccggcagcgattcggccttgatcgacgcatccgggccatcggccaccacgtagtgggtgcggtgctgttcgatcacccgcgccgggcgggcctgcggatgtgcggccatcgcggcctgccagtcggcctgctgcgccgggcccggccagggccagccaatggtctgcagggcgatgaaatcgggggtctgggtcatcgccgccattctacccgtgccgatgccctgccagcccagcaatgacgggcccggcgcccctgccatgcattgcagcaattccggtaggatggaagccccatgccttttgacggcccagctcccatgtccaccaactcgcccaagcccctggccatccgcgagcgcctttccgaagtgcgctacgaaatccgcggagaactggcgcggcgagcccgggagctggagacgcagggccgcaagctgatcaagctcaacatcggcaacccgggcaacttcggtttccgcgcgcccgagcacctgcagcgcgcgatcgccgatgacatgggccgcaccgacccgtacacccaccagcagggcctgccggtcgcacgcgaagccatcgcggcgtactacgcccgccgtggcgcaccggatgcgcaccccgaccgtgtgttcgtcggcaacggcgtcagcgaactgatcgacctgtcgctgcgcgcattgctcaacccgggcgacgaagtgctggtgccctcacccgactacccgctgtggtcggcctcgaccatcctcaacgatggccgcccggtgtactaccgctgcgccgccgagaacggcttccagccggacccgagcgagatcgagacgctggtgtcctcgcgcacccgcgccatcgtgctgatcaacccgaacaaccccagcggcgccagctacccgcgtgaactgctcgagcgcgtggtcgagatcgcgcgccgccacaacctgctgctgctggtcgatgagatctacgaccagatcctgtacgacgatgcggtattccagccggtcgcgccgctggccggcgaccacccgtgcctgaccttcagtggcctgagcaaggtgcaccgtgcctgcggctggcgcgtgggctgggcccacctcagcggcgacgacgcgcgcctgggcgacttccgcgctgcgctggacctgctcggcgcgctgcgcctgtgcgccaacgtgccgggccagtacgccatcgaggccgcagtgaacggcccggacaccatctccgaactgtgcaccccgggcggccgcctgtatgaaacccgccgcgcggtgatcgaagcctgcgaagccagtgagcacctgtcgctggtcgcgccggccggtgcgctgtacgcgttcccggccgtggtcggtgccgccgccaagggcttcgacgaccacaacttcgcgctggatctgatgaacaatgaaggcgtgctggtggtaccgggttccagcttcaacgtgccctaccgccatcatttccgcgtgaccctgctgccggaagcctcggtgatgcgcgatgtgttcgcccgcatcgaccgcgtgctggcccgccgtgccgaggacgcgaccaaggtcgtaccgctgaagccacgccgttcggtggcctgagccgtggcgctgtcctacctggcgctgggcgactcgtacaccatcggtgaagcggttgcggtcgaaggccgctggccgtaccagctcgccgccgccctgcgtgcgcaggatgtggcgctggccgacccgcagaccatcgccaccaccggctggaccaccgacgagctggacgccggcatcgatgcggccgcgccgcagggcccgttcgatttcgtcagcctgctgatcggcgtcaacaaccagtaccgcggccggccgctggacgagtaccgcgtacagttccacgccctgctgcagcgggcgatcggctttgccggtggccgccccgggcgtgtgctggtgctgtccttccccgactggggcgcgacgccgttcggtatcggcagcggccgtgacctggccgcgatcgagatcgagaccgacgaattcaacgcggccgctgaagtgatctgcacccagcagggcgtggccttcgtcgacatcaccgacatcagccgtgaccacggtggcgacccggcgatgatcgccgacgacggcctgcacccttcagcacggatgtacgcgctgtggagcgcgcgcgcgctgccggtcgcctcccacctgctcggcggaacggactgacccgatggatggcacgccacggaacggccagcccctgccctgcacacccttgagcgccgcgcaggcccgcgcgatcgccgaggcattccgccccgcacacgcctgggccagccgccgcgactactactacacccgcagcaagctgggcagcgacccgctgtatgacggcgtgctgcagcacctgcctggcgacgggcaacccgtgctggacctgggctgcgggctgggcctgttcgcccacgtgctgcgccagcgcggtggctgccagccctacctgggcgtggacgtggatgccggcaagatcgcccgtgcccagcgtgccgccaccggcctgcccgctgtgcgcttcgactgtctggacgtgcaggcgccgctgccggcgcaggccgggcatgtgctgctgctggatgtgctgcagtacctggacgcgggcccacagcaggcactgctgcgtgaggccagtatgcgggtcgctcccggcggccgcctgctgctgcgcacgccactggccaccggcgatggccgcgaccgcaccacgcgggtggcggaccggctggcctggctggtcggctggatgggcacgcggccgcgccactaccccgacccgcaggtgctgcaggcgacactggccgaggctggattgaaagtgacggccccgcgccccctgcacgggcgcacgccgttcaacagctggttgctggtggccgaacgccccgcgttgtagcgccgagtgcagcatgtgccggcgctacgctacaggatgatcgccaacccttgtagcgccgagcccatgctcggctgctctacaccaccagggcccggcgttacggaaccggcagccgcgccttcagcccccgctcgtccagcgcctgcagcacgcgttcgatgatcgccaggttgtggccgtgggcggccccctcatgcagcagcacgatggcgcccgggcgcaggtccggcagcagccgcgacagcacgccctccggcgtgcagccgacaccgtcgtagccacgggcgctccagcccacgcgcaccagtcccagcgccttcagcaccggcgccacgaacggattggtcatgcccaccaccgaacggtaccagcgcaccgggcggccgcttaccgcgtgcagcgcatgctggcatccctcgatctcggcacgcatcgctgccgggcccagccgccagaagcgcgcctgcggatggctgtggctgtggttgcccaggtcgtggccgcggcgcaggatctcctgcaccaggtccggctgtgccagcgcacgctcgcccaccaggaagaaggtggcgcgggcctggtagcggtccagcaggtcgagcaccgcacgggtctccgggccgggaccgtcatcgatggtcaaccagacgctgtttccggcctctcccatccggctcagcaccggcgcgtagaagcggctgttgggcaggaataccggcaccaggaacagtgcgtggctggccaccatcacgggcagcccccagtgccagccggccagggcccagaccaggatcacggccagctgcgacgccaccagccagggcagccagcgccagggccgggtcgggatgcgatgcaatgttcctgcgttgctcatcccccatgatgccatgaggggtagaattgatgattcgaattcccggaaccccgacgtccatgtccctcgatcccgccctgcgttcgcgcatcgaatccatcctcaacgccaaccgcgtcgtgctgttcatgaagggccagccgtcgatgccgcagtgcggtttctcggccaaggccgtgggcgccctgcaggacctcggcgtcgagttcgcccacgtcaacgtgctggccgaccaggaaatccgtgaaggcatcaaggcctatggcgactggccgaccattccgcagctgtacatcgacggcgaactggtcggcggcagcgacatcgtgctgcagatggctgccagcggcgagctgagcagcgtgctgggcctggccgcgccggaccgtaccccgccgagcatcaccgtcaccccggcggccgtggaaatgctcaagggcgcgctggccgatgccccgggcgctgctctgcagctgtccatcgacgccggtttccagccgaacttccagctggccccgcacgacgaaggcgccatcgccgccgagtccaacggcctgcgcgtgcagttcgacctggccagcgcccgtcgcgccaacggcatcaccatcgactgggtggacgacatccgcggcaagggcctggccatcgacaacccgaatgcgcccaagccggtgcaggaaatcagcgtgcgcgatgccgacgacctggtgcgtgccggcaacatcaccctggtggacgtgcgcccggccgacgagcgtgaaatcgccgccgtgggcgtgccgttcaagaccttcgacggcaactgccgcgccgcgctggaagccctgcccaaggacaccgcgctggccttcatgtgccaccacggtggccgcagcgcgcaggccgccgagcagttccgcgccctgggcttcaccaaggtgttcaacgtcaccggcggcatcaacgcctggtcggaagacgtcgacaacggcgtgccgaagtactgattgaaggcccggggtcagagccctttcctgcggaaaggcgatctgacccctaaaaaggggacggagggaattaagttgtttgtggcaaaaacgacttaattccctccgtcccctttttcttagccggcgaaaccgccttcggccaggtagtccagctcttccggtgaaggaatgcgacccagtacggcgttgcggtgggggaagcgaccgaagcggcggatgatgtcgcggtgcagctcggcgtactgcaggtattccttgtcgcccagcacgtcgaacatcgccaccgagcggtcctggtccagcggatcctcggagtgctcgaacggcaggtagatgaaggcgcgcagcttgggcaccagctgcaggtccaggccttcctcgatggcgcgcatggcgtagtgccgggccaggccatcggtggcgtaggaatgggcgctaccgcggaagcagttgcgcgggaactggtccagcagcagcatcagcgccagtgcgccctcggcactgcccagccagtgttcgcgcgcgcgcgaggcggctgcgaaatgctcatccaggaacaactggcggaactgcgcgtcgaacgcatcatcgcgggcgaaccacttcgcagggcccgcctctttccagaattccaccacgtgcgcggcaacgtccatcacctactccccagggccggcgcgccgcgccaggccatcatcatcattcgtcgaagcgcaggtggcggaccgacttgccgttgcgccggataagcttaagcgcctcgataccgatctggatatggttttccacgaactgggagctgaccttggcatcggaggcctcggtcttgaccccatcggggatcatcggctggtccgacaccaacagcagtgcgccgctgggaatgtggttggcgaagccagcggcgaacacggtggcggtttccatgtcgatggccatgcagcgcatcgcccgcagccgctccttgaacgcctcgtcgtgctcccagacccggcggttggtggtgtagacggtaccggtccagtagtcgtggccgagatcacggatcatggtcgagaccgcacgctgcagcgcgaacgccggcaaggccggcacttccggcggcaggtagtcgcccgaagtgccctcaccgcggatcgctgcgatcggcagcaccaggtcacccagctggttcttgcgcttcaggccaccgcacttgcccaggaacagcaccgccttgggcatcaccgccgacagcaggtccatgatgatcgcggcattggggctgcccatgccgaagttgatcatggtgatgccatcgatggtggcgctggccatcggccggtccaggccgatgaccggggcgccggtcagcgcggagaaggtgtgcaggtagccgccgaaattggtcagcaggatatgctggccgaactggtccagcggaacgccggtataacgcggcagccagttgtcgacgatttcctgtttgctcttcatgcccggtccggttctgcaggggcgccattgtaggcaacgctgcgcctgccctgccacacaaagagaaggggcggcccaacggccgcccctcctggtttccctgcgggagccggtggcttagaaacgcaccgaccagcgcaggttggcaccgtggtcgcggctttcgtcgccgaactggccgctgtagcccagttccagctgctgcttggcggtcagccaggccgagaggcccagttcggccaccaccgcgctgtcggcgatgggtgcaccgttgaccacgaagctgtcaccgccggtggcaaagcccaggcgggccgacgggttgcggtcgccgctggcgtggcggtacgccaccgcgccgcgcacgtgcaaccagctgtcctgctggaacgaggccttcaggcccttgtcgaagcgcacgccggccgtggccagggtggtgcgcacgtcgtccaccgaaccctgcagggccgcagcaccgccacgctcgttcacgtgcttggtgtccacttccacgcgggccacctgcacgtacggctccaggccagcctcgcggccaccgaagcggtaggccgcttcgatgaaggcctggcgggtacgcgcgtcgtagcgggcgctcagggtgtcgctgtaaccggcgaacgccagctcacgggtactgtccacatcgtgttcgctccatgccaggccgccacgcaggccgaaaccgccccagttgtggctggcgtaggcgccgaagtgggtgttgtccaccttcgacctcgcacggcgcccttcgccctgcttcacgtcggtgcggccggtaccggccagcacgcccacctgccagccgccgaactcgcggtcggcaccgaccagcaggccgttgctgttggcttcggtgcgggcggtgttggtgttgccatccagcgtggtgctgccggccagggcctgcacccacacaccggtggcgtcgccgccttcggcacccggtgcagcggcaccggcacggcgggccagcgcggcatcacgcacgtagcggctgccttccagcagggccgcgctggtggcggcatgcagttcgccgctgaggctgtccagtgcgctgcccacctgttccgggaacagcatggtcagcggacgcggcaggccctggttgaccgccagaccgtcgaccacggtggccacggccaactggttggcggtggtggccgcggtagccagcgcgttgccgcgggtcacttcaatgcgcgcgccggcggcggagtaggccaggccgaactgcaggaagggcgagaaggcgctgaaatcggtgctggcgaaccgaccgttcacgccgccgtcggcctggatgaagttgaactgctcgcccaggtagtaggtgcccggttccggcagcgccaccagggtgccgcccagggtggcggtgccggtcacgtgcagctggtcgctgcggctgcccggggccacttcggcctggtacacgccagtggcggtctgcacatagtcaccgttgatggtgagcgtgccgatggagttgcccggagcgatgatgccggccacggtggtgtttcccagctggcccacgcccttcagcgtgcccttttcacccacgaaggtgctgccgccggtctgcacgccgttgaaggacaccacgccgccggtgacggtcaggtccgagccgtccagcacaccggtggcggtgatgcggctgctgccgcccaggctgttcagcgctgtgttctgcagggtgccgttcagcaggaaggttccgccggtcacgtccacggcgctggtcagcgtgttcacgccgtccagttccagcacgccttcgcgcaccaccgcgccgttgaagctgttgtcgccgctcaggcgcagccagccgatgccgctcttggtcagtttgcccgggccgccgatgtcattggtccagtcgtcccatgcatcaccttcccacaccttcaggccgccggccttctggttcatcaccacatcggtgtccacgcgcagcgagccgtagccttcgacggccgcagccaggttcatcaggccccagccgtagacatcgtccacgcctgcagcacccaggtcggtggcggtggtcagcagcacgtcgcgcacctgcgcgctgtccaggtacgggaagcgctcgaacagcaggcccagcgcgccggtgacgtgcggggcggccatggacgtgccgctcagttcctcgtaatcggacgacggggtctggctgatgatgtccaccaccaggttgccattgtcatcgtagaaatcaccttcgatcaccgaatcgggaccgtacacggtcgagttgatgttcgagccgggcgcggcgaggcaccagttcgccgccaggccacagcgcatcgagcggttgctcagctccaggtcctgattgacgttgaccacggccagccagtacggctcgacgtcggcgacggcgcgcggcagcgaggcatacatgccggcaatcggcgcttcttccggcgaagtgttgggcgaatcggtgttgccagcggcccatacctggatcagtccgctgctgcgcgaaccttcggccatcgcagccagactggcggcgaacaccgggtgcgactggtacatgtccaggtcttccgctgtggtcggctcgttggccaggccccagctgtggttgatggcgcgcacaccctgctcgttcatctgcgcatacagctgcgggtagatcgaatcgtcggcctggatggcggcgatggtctgttcgtccagatacagggaaccgccgatattcaccaccgacaggtaggtggcgctgttggagaacaggcgggccacgctcaggtcggcgccgaaggcaacaccgtgggtgccgtggccatcacggttggcggcgatggtgcccgacacgtgggtaccgtgcacgttgtagctcaggccttcgtagaagccattgcgctccagcagatcggcatagtccgggtcgagcagctggtaggacacggccacctggtcaccgtcgctggcgaagcaggcgtccgggccactcagcacttcgcgcgcgcacaggctgccatcggccagcacatcggccagatggatgctgcggtggtccttgccggcgaactcgtcgtggtccaggccggtgccactgtcgaacacgcccaggcggatgccggtgccggtcagtccgcgtgcgtaggccacatcggcgttgatcgcctgcaggccccagtcgctgttgaattcggtggtgcgccagctggcggcatcacccggcttgcccatgatgggttccggatcgacttccacatcggcggcggcggcgacggccagcgacggcgaagcggtgaggaccggtgcggcaaacgcggcctgcaggctgcgctggaactggtaacgcgacaaggcgtctgcgttgctgtcctgggccagcgccggcagagcggcggccatcagcagcgagccaacaatggccgaggccaggggtgaggggaggatcgagcggcgggaagcggtggagcgatacgacgggaagacaatcatctgcagttacgtccttgattccttgaaatatttcaggtgcagctccgtcatggagcaatggaaagcacacctcacggcgggtcagcgctcgctgtcccaccggttggtagcggcaggtgtcacaaaaaattaatgcttcgttcagaatttttgtataggaaaatccccacccctgcccctgcccaaggtcacttggcaagtggtatcgacgacggatagcgtcggcggattcacgcgtgggttggggatctctgcatggcatcgatggtgttgcgcgccgctcttgggatggcgctggtttcgttgagcacggcaccgacgatgggcgcctcgcgcttcgtcgccgatccctaccccagcacctaccgggcgcatcccgatgcgccggtgctgatccagaacgccaccgtgctcaccggcaccggccagcgcctggacaacgccgacgtgctgctgcgcgagggccgcatcgccgccgtgggccgccagctgcaggccgatgccggggtcacccgcatcgatgcgcggggcaagtgggtcaccccgggcctgatcgacgtgcactcgcacctgggcgtgtaccccagcccgggcgtcggcgcgcacagcgacggcaacgagatgaccgcaccggtcaccgccaatgtctgggccgagcactcggtgtggccgcaggacccgggcttcgctacagccctggccggaggcgtgaccagcatgcaggtgctgcctggctcggccaacctggtcggtggccgtggcgtgaccctgaagaacgtgccggccatcacctaccaggccatgaaattcccgggtgctccgtgggggctgaaaatggcctgcggcgagaacccgaaacgggtttacggcgaaggcaagggcgtcgccccagccacgcggatgggcaacgttgccggctaccgcgccgccttcatcgatgctgccgactacatcgccaagaacaaacccaagccggccaagcgcaagggctggttcggcagcgacaagggcgacagcgccggtgatgccggcggcaagcgcgatctcaagctggacacgctggccggcgcgatcgaaggcgacatccgcgtgcacatccactgctaccgcgccgacgagatggccaccatgctcgacctggccaaggaattcggcttcaaggtggcggccttccaccacggcgtggaggcctacaagctggccgaccggctggccgccgacggcgtctgcggtgcgctgtgggccgactggtggggcttcaagatggaagccttcgatggcattccggagaacatcgcactggtcgaccggccgaagaacagctgcgccatcgtccattccgattcgcccgaaggcatccagcgcctgaaccaggaagcggccaaggtgatcgccgccgcgcgccgcgcgcacatgccggagatcacgcccgaacatgccatcacctggatgacggccaatgccgccagagcgctgggcattgaaggccagaccggcaccctggaggccggcaagatggccgacgtagtggtgtggaacggcaaccccttcggttcctacgcgctggccgaacaggtcttcatcgacggccgccgcctgtacgaccgcagtgcgccgacagcgacgccgcgttccgatttccagctcggccaggaggtgcactgatgggcgcgttgaacaagcgtcgccgggcttggctcggcgctacggtcatggtgctggcctgcctctccgcagctgcgcaggcgcaggacctgctggtccgcaacgccaccgtacatacggccagcgcgcgcggcagcctgcagcacgccgatgtactggtgcagggcggcatcatccgcgcagtcggcaacgggctgtccgcaccggccggggccaacgtcgtcgaggccgatggccgcccgctgacacccgcgctgttcgggggcatcaccgagatcggcatcgaagaagtctccggtgaagcgagcacggtcgacagcacgctgaagatcggcgaacaaccgttgcgccccgaattcgatgtcaccctggcctacaacccggcctcggtgctgatcccggtggcgcgcctggacggcatcggcttcaccgccctgggggccgccaccggtggcggcttcgtcgctggccagggcggtgtgatgcggctggacggcagcgccgatcccctcgggccgcgcgcgctgttcctgcgcctggggtcggccgcagtggaactgaccgggcattcgcgtgcggcgcaatggatgctgctgcagcagatggtggacgaggcgcgtggccaggtcgccgcggactcaccgcatgcgctgctgaccccggccgggcgccgcacgctgggccgctacctggccggccagggccgcatcgtggtggaggtggaccgtgcggcggacatccgccagctgctgcgctgggccgcccgcgagaaggtgaagatcgccattgccggtggcagcgaagcctggcagctggcaccggagctggccgccgcgcaggtgccggtgttcgtcgacgtgctgtccaacctgccggccagcttcgaccagatcggtgcaaccctggaaaatgcggcacgcctgcaacgggccggcgtggcggtctcgttcgtgcagcgtggcgacgcctcgcacaacgcccgcaagatgcgccagctggccggcaatgccgtggccaatggactgccctgggccgacggcctggccggcctgacccgggtgccggcgcaggcgttcggtgtggccgaccagatcggcagcatcgagccgggcaagcgtgccgacctggtgctgtgggagggcgacccgctggacgtggcgcactatgccgaacaggtctggctgggcggccgggcgatgccgatgcgctcgcgccagaccgagctgcgcgatcgctacctgctgcgcaacgcgcagccctgaccgcattgaaggacaccaccatggccaccctgcgctggtatttcgacttcgtttcgccgtactcctacctgcattggcagaagctgaagcagctgcccgagttcccgcggatccagccggtgccgatcgcctttggtgccgtgctgcatcacctgggcaacctcgggccggccgagattccggccaagcgccgcttcatctaccgccagctgctgtggaccgcgcaggccgaaggcacaccgctgcggttcccgccgggccacccgttcaatccgctgtctgccctgcgcctgtgcctggccgcgggtggcagcgcacgggcggtggacgtgctgttcgactggatctggcgcgacggcaatgccgccgacagcgccgaggccctgcgcgaaccagccgcgcggctggggatcgaggatgtcgccagcgccatcgcgactcccgcggtcaaggagcagctgcggaggaacaccgaagccgccattgcaaccggcgtgttcggcgtgccgaccctggccatcgatggcgaactgttctggggcaacgacgcccacccactgatggcggcggtgctggccgacccggatctgctgcggcagcccgaatggcagcgcctggccgagcttccggtggccgtgcagcgcagtcgctgaacagggcgtgccgcgtttccctcgcgcgccacgccagactttgagatagatttcacatttccgaacctacaaccgccctggagggggagccgcggatgcgcatcggaatcgtcgtcgactcggcctgcgacctgccgcaggacttcattgccgagcacaacatcgtgctgctgccgatcaccgtacggatcggcgaagccgtgctggccgatcatcgcgatgagcaggccaccctgagcttcctgcacgcgcatgtggccgaacatggcgctgaagcggaaaccatccccttcagcgtcaaccagatccgcgacctgttcctgcagcagctggtgatcgattacgaccacgtgttctgcatgaccatcaccaagacccgcagcccgatccacgacaacgcgctgcaggccagcttcgccatcctcaacgattacaagccggtgcggcaggcagcgggctacaactcgccgttcgcgctgcgcgtacttgatacccagaacctgttcgccgcgcaggccgtgaccgcggtggaggctgtccgcctgcgtgacagtggcgccagcgtgcagcagatccgcgaacggctggaagaactggccggcaacgtgcacggctacatgatcacccgcgacctgtactacatgcgcgcacgcgcgcggcacaagggcgaccgcagtgtcggcctgctcagcgcggaactgggcagtgcgctggacatcaagccggtgctgcacggctaccgtggcgagaccgggccggtggccaagatcaagggcttcgacagcgccgtgcagaagctgttcgcggtggtcggccagcgcgtgcgtgccgggctgatgacgccgacggtgtgcgtcagctacggcggcgaactggacgagctgcgcagcctgcccggctatgcacagatgaaagaggtctgcgccggccatggcgtgaccgtgtacgaatcggtgatgagcctgaccggcatggtcaacgtcggcaagggcgcggtcaccgtgggatttgccgatgggccgcatcggttcgaatgagcgctggccacggcaggaatctgcacatcgattccaccccgactgtgccagccttgccgcacttcaaggagaactccatgcctgcgcagtaccacatcagcctgcccgatccgtccaaggcccgcggcaacgaccctgacctgtccttccattcccagggcgccgccggtttcgccgaagagctgcaggatgccctgcgcagcggcacgctgttcgaacgctggaaggccaagcagcccgacccggatgcggtggaaccgcagtggggcgtgaccgacccggaggccaccgtgaccggcgagcagaaggacctgcgcatcaacctggtcgccaccacccgcatcgacagtgacgtgttcaagcagcgcctgcgcctgctggccggcagccactgggaactgcgcgacgtgcgttgaggcacccgcccgccgggcatggcccggcgctaccgtgcccgtgtcgtgatcgacccggtgccgatgaccatgctctggtagacgccacccttggttggcgctccaaaaaaactgccaaccaaggttggcaactaccgacgaaccgccgggcatggcccggcgtttccctatcgctaccagccgccaccgagcgcgcggtacagctccacccgcgcgatcgcggcggcggcctggctgttggccagcgcggcctggttgtccagcgcgatgcgctgggtggtcagcacgtccagcatgtcgaccacgccggcctggtactgccggcgcgccgcccccagtgccgtctcgctctcatccaccgccacgtgcagctgcaccgtgcgctgctgctcggcactgtagccgtccatggcgtcgtccacctcatgccaggcctgcaacacggtacggcggaactgcagggccgactgttgctgctgcagcctgctcagcgcgaggttcgccttcagccgcccgccctggaagatcggcaggctgatcgacggcccgatgctgaaacggtgcgcgttccagccatccaggtcatccagctgcttggcctggaagcctgcgtcaccattcaaggtgatgcgcggcaggaaactggccttggccacgccgatgccggccgttgccgcatgcagtgccgcctcggcacgacggatgtccgggcgacgctcggccagttcactcggcagacccaccgccaccgctggcaacgccggccagtcacggcgtgcatcctgcagctgcgcgtccagcgcctgcggcggctgtgccagcaggaacgccagcgcattgcgcagctgcgattcgcgatgccgcagcggcgcgatgcgcgcctgcagcgaagccacctgcgcggccgcgctggacacctgcagcgtgctggccacgccctgccgctggcgcgcctcggtcaggcgtttgatgtcatgcgcgatgctgaggttgtcctcggtgatcgccagcagctgccgcgtcgcacgcagctgcaggtaatcacgcgcggtttccgccagcagcgcgatgcgcacggcgtgtgcatcctcctcggccatctgcacgcgtgcgtcggccgcttccacctggcgccgaacgcggccccacaggtccagttcccagcccaggccgataccggcctggaacagcccgtagtcatcacggccgccgttgccggacggatcattcaggcccacctcgctgttgcgtgcacgcacgccactggcgctcgcgctgacgctgggcaggtgatcggcggcggtgatgccgcgcgcggtgcggctctgctgcacgcggttggcggccagctgcaggtccaggttggccgccagcacctgatgggccagctgccccagcagcggatcgtcgaagccggcccaccaggcggcgtcctgatcgatggcgttgccggcgacagccccaccctgccagtggccgggcagttccgcctgcgggcgtacgaagtccgggcccatcgcgcaggcagccagggccgtgcacaggctggccgcaacgaaggtgcggaaaacggtaatggcgctcatgcgccctccccgcgcttgtggcccggtccgtgctgcatgctctgcgcacgcgcgcggctgcccaggtcaacgctggcttccaccgacatgccggcacgcagctggtccagcagcggctggcccggctccagcacgatcttcaccggaatgcgctgcaccaccttggtgaagttgccggtggcgttctctggtgcgactgcagcaaaggtgacgccggtggctggtgcaatgctgtcgatgtgcccgcgcagcggcgtgcccgggaatacgtccaccttcagttcgacctgctggccggcctgcatgcgggtcatctgtgtttcctggaagttggcgaccacgaaggcgcgcttcagcgggaccaccgcagccaccggcgtacccggggtcaggtaggcaccgacgcgcactgcgcggcgaccgaccatgccatcgatcggcgcgcgcagcacggtgtgcgacagatccagttcggcgcgtgcctgtgccgcttctgcacgctgcaccgccgcctgtgcagcctgcacgcccgcgctgaggatgtcggtgcgctggcgtgcggtcgacagtgcggcctggccctgctgcagatgcgcactggccacggcctgcttcgactgcgcctgctgcgcgttctgcacggtaccggcgccatcacgggccagttcgcggtaacgctgctggtcggcactggccagggtcagttcggaacggctgacatcgacgctggccctggcctgcgcgatcagcgagtcctgctgggccagtgcggcctgcgcattggccagctgcgcacgggcattggcaaggtcggcacgcgcagcctgcagtgccacctggtagtcgcggtcgtcgatgcgggcaaggacgtcgccggccttcaccgactggttgtcctctacctccacggcactgacgaagccggcaatcttcggcgctaccagggtgtagtcggccaccacgtacgcattgttggtggtctggtgaccgccatcgcgcagcagcagccacgcgccgatggccagggccagcacgcccaggcccaggccggtgttgagaggggttcgattgatcgtcatgagggggttcctgcgaaaggttcaggccacggcgcgtggcggatggatgcgggtgggcatccaggcaatgaggggaatgaaggccagcgccaccagtgcgaccacccagtacaggtcggcagaagtcagcgcctgtacctgtgcatgcaggcgcgcgcccagctgcgggccatcggccagccacggttgctcgcccaggcggtcgaccagcacggtggaatggaaatgacggcggccttgggcgatggcatccagtacgccaccggcgagcaccgcagcgaagcccttgaccgtgttgaaccaggccgaggcaaacgggccatcctgtggcgccaggccgccggtggccagcatcagcagcggcagcaccgccatcggctgggcaaacacctgcagcagctgcacccacaggaagttgtcgcggatccaggccacgtccaggtgcgagcccagccagcaggccagtgccagcatcgccaggccggtggcctgcacccagcggcagtccaccgcgcggatgttcaacagggccgccaccagcggcagcgcgatcacctgtggcagtgccacccacagcagcatcggtgcggtctgcagcggccggtagccctgcacgctggccaggaagccggacgggatcgagatcaccgccagcagcacgaacagcacgccacccagcgtgaccagcgagtagctgagattgcgattggccaacaactgcagcttgaagaacggcagcgggtggaaccattcgttgatcatgaacagcaccatcaggccggcaccgccaccgatcatcagcgtgatcatcggcgaatcgaaccagttcagccgcgggccctgcaccaggcccagcaccagcagcaccagcgccggcaggccgagcagcagcccaacgccatcgaactgggcgaagcgttccagccgcagcgggtcctgtggcagaccccagccgaccatcgccatggcggccaggcagtacggcacgatctgccagaacgcccagtgccagcccacctgctcgacccagaacgcggccagcggcgtgcccatgctcgggccgaacgtcgccgtcaacgcgtagccggccaggccgtacagcttgatgccaggcggcaggaagcgcagcgccacgctcatcagcaacggcggcagtgcaccgccgcacaggccctgcaatgcacgcagcagcaggaacacctgcaggttcggggcgagcgggcacagcacgcccagcaccatgaagccaccgatcatcgccagcgcgaaacggcgcagcgagaacgtggcggcacaccacggcgcgaaggccatcgcgctgaccgacatcgcgctgtagagggcgacgatccagctgccgtcgtcgacgctgaaacccatcgcgccacggatgtcggccagcgcgaccttggtgatgttctcgttgaagccggacaccagcaccgccagcagcacgccacacaggccgaccagaatgcggcgatcgagcccgggggcggcggcaggacggggcgctgcggcggccgggacagcggcggccggcgcactcatcgccaggcaccgatccgtgcagtgcacggcatgttgagggtcattggaatgcgctcagtgaaactccggggagcgcagtctagggagccggtaccctgtgaaaaatggcgtcgccggcatcccaggcgtgcgtccagcgcacgcctgcgggtctcagcggtgggcgtcctcgacgcgctcgcacatggtcttgatcgaacggcgaagccactggtgcgcggcatcgttgtccagccgcggatgccaggcctgcacgatggccgcggtacgcaccgggatcggcagcgggaacaggcgcagcggcaggcgcatgctgacgatccgctccagcatcacgcttggcatctgcggcaggatcaggtctgattcggccgccgcgaagatcgcaccgtggaaggtcgggctgatcagggccacgcggcgctgcaggccgagcgtggccaggtcatcatcgatcggcccacgcggcaggccacggcgcgacaccgcgatgtggtcacacgcggcaaagcgctctgcactgatctcctcgtcgaacagtggatggtcctcgcgcgcggcgcccatgaacgaggtactgaacaggttctgcaccttggtatcgggcgcatgcttgccggcggtgctgatgtacaggtcgatccggccctgcgccatcgcatcatcgtcggtatcgccctcgggcacgaagcgcagcaccgcgcgcggtgcctgctggcggaagatctcgcgcaggcgaccgccaaatccaccgatgaagacatcattggcgcgcacgctgaaggttcgctcgagcacgcgcatgtccacttcacgaccagcgttgaagacgcggtgggcctgctcgatcacatcgcggacctgctcgcgcagctgcagcgcgcggggcgtgggcgccagaccgcggccggcacgcaccagcaccgggtcacccagcgcagtgcggatccggcccagggtgcggctcatcgccggcgcgctcaggttcatgcggcgcgcggcggcggccacgctgcattcgtcaatcagcacgtccagtgccagcaacaggttcaggtccggcaggggcatgacagtctccagtaaatcagatgactctacggcacttgcaaccaccgtggattgcgttcgacgcattcattgactgccgcgcacggcatgggtgcgcgcggtgacatcggcgaccatccccgtcctgccaaggagacatccatgttcactaccctgctggtcgccctggatggtggcccccagcacgcacgcgtgctggacctggccgccgccatcgccggcccccacagccgcctgcacctgctgtgcgtgctcgaccccgaattcgcgctggcggccgatgccagcgaagccgatcgcaccgagtatccggaagccgcccgccagcgctcccgcgccgaggcagtattggccgaagctctggccgaactgcgcgagcgcggcgtcgatgccatcgcgcagatcccctccggcgatcccggcgaagtgatcagcgagcaggcccggcgcctgaagtgcgacctgatcgtgatcggccatcgccacctgtcccggctggaacgcctgttcgaaccctcggtcgggcaatggaccatcgaccacgcgccctgccccgtgctggtggaaacccgcgacccacaaccctagctgccatggcctcccgttcccccttgttccccacccgcgtcagctaccgcgccttcggccgtcagttcggccgtggcgagcaggcgctgctgggcgcgatacggcagttgcgcgaccccgatctgcaggccgatggccttgcccagctgagcggactcgggcttggccaggagggctgcgacgccttcatcggcctgctgccgctgctggccacccccgccgctccgatcgatctgctgccggccggctctcccttcattgccgccagtgaactggacctgctggtctgcctgctgcgcatcgcacaatggcggcatgcacggccccgcgaggacgactcgctggcaccgttgcgccagcagctggcgcgctgtgcaatggccgtgcaggcggcaaacctgccgttgcggcagcgctcgttgtcaccggtcgggctgaggctgctcgatccgaccggctggttgcggcagcgataagccgtcgcgccccccgtgtgatcgcatgcagagagctgctcagcagtccatcgttccgtgcgtgctgccctcgtcatccagcacgtgcgcatgcaggatcacctggttgcggccagcccgcttggcggcatacaggccggcatcggcgtctgccagcaactgatcggcactggccagagccggcggatgcaggtaacccacgccgatgctgatactgaccgatccttccggcaacggcagcgcttcgaccgcctggcgcaggcgctcggccagcgccagaacgcccgacagcgcgcttccgggcacgatcaccgcaaattcctcgccgccataacgtgcgacgctgtcaccggcgcgaccggcgctcgccttcagtaccgctgccacggcctgcaggcagcggtcgccggcgggatggccgtggcggtcgttgaaggccttgaaatgatcgatatccaacagcagcaggcccagctcggtgccactgcgccgtgcgcgattccactcggccagcagcagcgcgtcgaactcgcgccggttggccacgcctgtcaggccatcctggcgcgccagctggtccagcgaggcctgccgttccatcaggtccacctgcagcaggacgctgcgcaggccgaaccccagcgtcgccaccacgaaaccgctcacggccaggggccgggcatggtcgaccaccagggtgcccaccaccagcagcagcagcggcaggatcatcgggcccgccgcctgcaccgtgcgcgccatccgcggatgcggcgtcaggacccgcgccggtgcctggctgagtgcgagcagcgccagcagcaggaacggcagatcgatcagcagatccgcataggcaccgaacgcatcaccggaggtgtagtggttgatgtaatacgccaccaacaggtaggtcgccgcatacatcgccagcgcgcggaaaaaggtacgccgctcgggaacgtcgccggccagccagcgcaccaccgcgaacacggcgatgcacaggttctggatatcgaacatgcgttgcatgttggacaacgcgtggtcgtcgatgtcaacgcgggcggcgaacgactgcgcgtgcacgaagaacagcacgcccagcagcgccgccatggccgcatcgatcaggctgatgctgacccgttcccggcgcgccctggccaggatgaacaccaggggcacaccgtagagcacgtaaaggaacaggcttgcgcgcggggtgaaatcggcacgcccggcgcccagggcgtcgatcatgttgaacgccatgccgccggcccacagcagcagcgccaatgccgtggcgcgccaccccagtgccgcgtggtcgcggcgggcccgccacaggcaggcggccgccgccagcaacggggcaccggtcaggaaaacgaaggagcctaccccggccggaccaggccacaaggccagcaccaggccatggcacagcacatacagcagcgccagcactaccggcatgcatcccccgatccgcaaggccgtctacgcgcacgatagcgcggggcggcgccacgagggtgtgatccatcgctgaaaaaggggacggaggggattaagtcgtttgcggcacagcggcaaatgcgacttaatcccctccgtcccctttttttccgggggctcagccctgcagggcgcgggcgtggtgggcgatgtgctcgccgatgtagctgccaatgaagtagtagctgtggtcgtagccgggctgcaggcgcagggtcagcggatggccggcagcggcgcaggcctcctgcaggcgctgcggctgcagctgggtctgcaggaactcgtccgcctcgccctggtcgatcagcaacggcaggcgctcgctggccgcggcaatcaatgcgcaggcgtcccattgcgcccagtcggccgggttgtcgccaaggtaggcgtggaaggccttctgcccccacggaacatggctgggcgcgacgatcggcgagaacgccgacacgctgcggtagcgccccggattgcgcagcgcgatcaccagcgcaccgtggccgcccatcgagtgcccgctgatggcgcgtgcgccggtcgccgggaactccgcttcgatcagcgccggcaactcgtgcactacatagtcatgcatgcggaagtgcttcgcccagggcgcacgggtggcgttgaggtagaaccctgcgcccttgcccaggtcgtagccttcggcatcggccacgtcatcaccgcgcgggctggtatcaggcgcgacaatgatcacgccgtgttcggccgcatagcgctgcgcgcccgccttggtgatgaaattctgctcggtgcaggtcagcccgctcagccagtacagcaccggcagcgtctgcgtttccgcctgcggcggcaggtacacggcgaactgcatgtcgcagcccagcgtggtcgaatgatggcggtagacatcctgccaaccgccaaaacaggcgcggtgttcaatgcgttccatggtgctctcctgcgcggcgcgtcagcgcacgcgtgcttctggtagatgccgaccttggtcggcttatccacgcccggcgtggacgccttggttgatcagttcatccagctgtgccagcaggcgcagcaacgattcgacgccaggctggccgtccaggttgcgatacgccgcgaccgccacgtcgctgcgcggtggccacaggccgtcggcgcgggcttcgtgcaggcgcggcaggaatacctgtgccagccagtgctcgaacggcatttcatcaatgccgaagggcgagtccaccgcgcgcggtggacccacgccgccctcgacccagcccagcgcgcgcagcgcctgctcgatcgggtcgaccagggccgcgcgtggatcctccgcacgcggcctgcgcagggcgtcgaaccagcccacgccgcggctcagtagtggaccaccgaacggatcgacttgccttcatgcatcaggtcgaaggcgtcgttgatcttgtccaggtccatggtgtgggtgacgaacggggccagttcgatatcgcccttcatcgcatcctcgaccatgcccggcagctggctgcggcccttcacgccaccgaaggcggtgcccatccacttgcggccggtcaccagctggaacggacgggtggagatctcctggcccgaaccggccacgccgatcaccacgctctggccccagccacggtgcgcgcattccagcgccgcgcgcatcacgttgacgttgccgatgcactcgaagctgtggtccacgccccaagtcgtcatctcgacgatgacctgctggatcggcttatcgaaatccttcgggttgatgcagtcggtggcgccgaattcgcgcgccagttcgaacttggacggattggtgtccaccgcgatgatgcggccggccttggcctggcgcgcgccctggatcaccgccaggccgatgccgccgaggccgaacaccgccacgctgtcgccttcctgcaccttggcggtgttgtgcaccgcgccgatgccggtggtgacgccgcagccgagcaggcagacgtgttccgggttggcgtccggattgatcttcgccagcgacacttcggccaccacggtgtactcgctgaaggtcgagcaacccatgtagtggtacagcggctcaccgttgtagctgaagcggctggtgccatcgggcatcacgcccttgccctgggtcgcgcgcacggccacgcacaggttggtcttgccgctcttgcagaacaggcactcgccgcactcggcggtgtacagcggaatcacgtggtcgcccggcttgacgctggtcacgccctcgcccacttcaaccacgatgccggcgccttcatggcccagcaccaccgggaacaggccttccggatcatcgccggacagcgtgaacgcatcggtgtggcagacaccggtgtgggtgatcttcaccagcacttcgcccttcttcggcggggcgacgtcgatctcgacgatctgcagcggctggccgggaccaaaggcgacggcggcacgggacttcatggtggactctccagagacaggcaatgacaggatgggcggcgccatgttgcgccgtcgtttatttcaggtatgaacggatcaacgcgctcatgtcgcgcacgcgttcggcgcgttgttcgtcggaggcggcgggttgcccgaactcctcgcgcagatgggcctccatcacctcggacatcaggccgttgaccgcgccacggatggcggcgatctgctgcagcaccggcccgcagtcggcgccagcttccagcgcgcggtccagcgcatcgcactggccacggatgcggcgcacgcgggccaggaccttcttcttctcttcgggggagtgcggcatgatcaggccacctcgaaactatactgggggatagtatacacgggcaaccatcccgctcaatcgtgccgtttcaatcgaacaagccctcacccgccagccgcgccagctcatccaccacatagcgcaccttcggccgcaggtgccgggtcggtggccacagcgcatggatgtcgatatgccgttgcatgtgcgcatccagcaccgagtgcagcgcgccggattccagatgtcggcgtaccagtgaaatgggcatctggcagatgcccagtcctgcgatggccgcatcgatcactgcgtcaccatcgttgagctggtaggccgcgttcgggatgaacgttacctcggcgtcatcactgccaatccgccacgccaccggttgcccatggcggaagccgacgatgctgcgatgctgcgccagttcctccacggtcgctggcacgccatgcgcctgcaggtactccggcgatgcgcaggtgaccaggcgctggcgacccagccggcgcgcgaccaggtgctcggcctggtgcaacccgccgaagcggatcagcaggtcgatgccctcttcgaccggatcgacgaagtgatcggtgaaggtcatcgtcagttgcaggtccgggtactgccggcacaggcgcagcagcacgggcagcaccaccagccgcccgaacgaggatggcatgtcgatgcgcagccgtccgctgggcaggccggccgaccccaggcaggcttcggcggcggagatttcttccagcgccgccgcacacgatgcgtagtacgcctcgccatcggtggtcagcgcgatacgccgcgtggtgcggtggaacaggcgcacgcccagccgcgcttccagccgggcgatggccttgcccactgccgagcgcgagatgcccagcgcgtcggcagcctcggtgaagctgcctgagcgggccgtggtaacgaaggtcaccaggccattcaacgattccagcggcagcatctatcacgctccattggggacaaatagtcccgcgcccagggagatcgaagcgctttatgcgtccgcatgtcaactccatcctgtgtgcatcgcgccgctggcgccttcccccacaccgagatgaccgacatgatcgccgccctgttccgccccttcgatctggcaggcaccgccctgcgcaaccgcatcgcgatggccccgatgacccgcgcccgcaaccccggtgcggtcgccaacgaactcaccgcgcagtactaccggcagcgcgccagcgtcggcctgatcatcagtgaaggcaccccggtctcgccgcagggccagggctacatcgacgtcccgggtatctggtcggccgagcaggtggccgggtggaagctcgtcaccgaggcggtgcatgccgcacagggcacgatcttcgcccagctctggcacgtcggccgcatgtcgcattcctcgctgcagcccgacggtgggcagccggtcagcgccggtacccgcccggtggccagcgcaccgaagaacacctcgttcgtgtacctggaggatggcagccgcggccacgccgatcccaccccggcacgtgcactggagaccgcagagatccccggcatcgtcgacgacttcgtgcgcggcgcagagaacgccatcgccgccggcttcgacggcatcgaactgcatgccgccaacggctacctgttcgaacagttcctcaacccggtcatcaaccagcgcgaagatcactacggcggctcgctgcccaaccgcgcgcgcttgatcctggacaccgtcgatgcgatggcccagcgcatcggtgcgcagcgcatcggcgtgcgcctggcaccgaacaatctcaccttcgacatgccgttctaccccgacaacgaggccacctatctgtacctggccgaggaactgggcaagcgcggcctggcctatgtgcatctcaacgacaaccagcaggcgggccagtcggtgctgggcgaggccttcctgcagcagttcaagcaggcctacggtggcaccgtgatcctggccggcggcatgacccgcgaacgcgccctgcagctggtcgaggccggcaccatcgaccttgccgcgttcggccagccgttcatcgccaacccggatctggtcgaacgcctgcagcgcaacatcgcgttggccacgcccgaccgcagcacctattacgggggcggcgaggcgggctatctcgattacccggccgcaggctgatcccgcacggggcccgcacggggtcggatccccttccaacggaaagggctctgacccctgttcggcgaacaaggagtcagagccacgctgcgcccggatccgaccccggccctcaggcgtcctcgcgcacgtaggcgaacgactcgtccaaccgctcgaagccgatcacttcagcgacgatggcctgtgcctcgtcttcgctgaagttcccttcttcaatatcgtcaacgcgggcgaacagccgctgcaatgccgcatactggtcgccgcgcaggaaggaatggtgagtctgcagccagcgctgcagattcccggccagctcgccgtgcgacagcagtgtgtacggccgctggtagtcggcaaccgcttcgaccatcttgcggaacacgaaatcctggtagctggcggccagcacgtcggcacggtcgtcgtcatgccacaccatcaccaccggcggttcgctgaaaccgggcgcgttgctccagaaacagtaactgtcacccgcgccggtccgcgcaaagggcagcaactgcaggtcagtgcgcaggggattgtaatgatcctccgcggtcagctcctgccacgcctcgagcagttcatcgtcctccaacggctcatagtcctgggcgtacagcagcaccggcggttctgcctgcagcgccgggaataccacctcggaccattccggatggggagcaccccagctcaaccgacccgctgcatgcaactgcttgaacaggggcgggaaggtctggcccgtggcctgttcgatgccggatagcgcgctcatggatgtccttgtcgatggagaccgcccagcttgcccgaatccgcgcaggagatgaaccggcggcaccacgcggcaggactagactgcgaccaccggatgccgcccatcgctaccatgaacgccactgcccacagcttcatcgtcaacatggacgtgcccgacctggccgccgccgaagacttctacatccgggccttcggcctgcgcatcggccgccgtctcggcccgggcgccgtggagctgctcggtgggccaacgccgctctacctgctgcacaacgacgccggcagcgccgccacggaagacggcgacgtgcgcgactacgagcgtcattggacgccgctgcacctggactgggtggtggatgacattgaagccgcgctggcacgtgcagttgcggccggggcgacactcgagcagtccgtgcgcgagcgtcgctggggacgcatcgccgtactggccgatccgttcgggcatggcttctgcctgatccagttcagtggcgaaggctacgatgcgctggttgaatgaccggcgcgccgttcaccacggcaacggcactgcttcgccgttggcgcgctcgccgtagtacagcgaaggcagcagccgcgacaggaaactgaactccgtatagcagtgcctgagcaggcccaggccgagcacgaagcggctgcgcagcacgcagccaaacggcgtatcgcgcgccacatgcagcatctgcccatcgcagggatcgccctgtacatccagacgcacgtgatcaccgaagccgatgcgcgcggcgatcaccgccgatacatggcctgcatcctgtgccgcctgcaggcgttcgggcaccagcaaggtgcgcgggtcatggaacttcaggcgcgccgccaccggcggaatgtcagcgagcgattccaccgcatggatgctggcgccgtggtagctgcgcccgcgctgccaggccgcgtcccagccgcgatgctcgacatgatcgaccggatgccaccagcggatgtgctgggtggtctcgaagaaggtgaaccaccagtccagcatgcggcccttgcagccgtgcagatcggtgcgcaccgccaccagcagcgtgccgtcttcgcggcgctggatgccggtttccagatgcatcggcgccgggtccagcagatcgtggtggtccagccaggggcgagcgttcacagcggtatccaagggggtctcctacgggttgggagacccgacaataaggaaacgctttccgtttctcaattaaccgggtgcggtaagatgggcgcaatgaacagcaccaccctgcccgcgcccacatcaccgacccgccgccgtggccgccctgcgcgaccggaagccgaagtccgccacgcggtgctgcaggccacgctggagctgctgctggcacagggttacgaggccaccaccattgaagcggtggcggcgcacgccggggtggcgaagaagaccgtctaccgccatgccagcaaccgcgaggagctggtcgggttggcggtgcgtgagtggaccgacggcttcgcgccacagctgcagcgtgatgcgcgcaatgcccaagaggtcgtgccgttgctgcaggacatcctgcacgcggtgtgcacgcaggcgctatcgacgcaggcggtgcaggtgttccgcctgctggccaccgatttccccgtcaaggacgcgctgctgcaggcctacctcgacaacggcatcgaacgcggccgtgcgctgctggccgactggctggcacgtcagcagcagcgtggactgctgcgcgagggagattccgcatgcatggcgcggctgatcctggcgatggccgtggccgagccgctgcgcgaacgcgtgatcggcgtggtggccgaggatgcgccggtggagatgcatctgcgtgagtgcgtggcgttgttggcgccggtgttgcaagggccgtagcgtggtgccatccacgcatggcgtggatctaccggccgatgtcgattcgttgatcggcaacgccctgccccggcaggtgccgaccgttggtcggcaccacgtcatccatcgcaactcactcgcgcaacatatccacgaacgcacgcaacgcgcccggcatctgccgctgcttcgggtagtacagcgcgaagccggcaaacggctcgctccagtcttccagcaccgccaccatctgccccgattcgatgtacggccttgccgtgtcttccagcacgtacgccaggccgatgccatccagaacggcgcgcacgatcgtgccctgctcgcacagggtcaaccgcccgggcacgtcgatctccagcgcctgcccatcgcgctcgaactgccacttgtacaggtgcccactggcgaagcggaagcggatgcattcgtgcgcggccaggtcgcgcggatgctgcggtgccggccgacgccgcaggtagtccggcgagccgacgatcagcccgcgcagtggcggccccatcggcaccgccaccatgtcctccggcacgaactcatgcaggcgcacgccggcgtcatagccctcggcgacgatgtcgaccaggccgtcattttcggtcagctccacccgcacgtcgggatgggcgtgcaggaagcgcgccagccgcggccccagctgggtcggcaccgccgcgcgggtggcgttgatgcgcagcaggccggccggagcggcgcggaagtggttcatctcctccagcgcgtcatgcacctgccccagggctggctgcaaccgctccagcaggcgctgcccggcctcggtcagggccacgctgcgggtggtgcgatggaacaggcccacccccaaccgttcctccagcgcgcggatcgcgtagctcaccgccgaggtcgacagcgccagctcggcgccggcacggcggaagctgcggtggcgggcgaccgcggcgaacgcggccaggtgggagaggttgtcagtggccacgattgtgcagtttcacttgatgaatcatgccgatatccgcgcttcttgctgctggttgcggggcgtattgtaaaacgcctttcgataaaccctgccaaggattccccatgtccctcgcccgtggttacgccgcccattcccataccgacccgctggtcccgtacgagttcgaacgccgcgcggtcggcccggacgacgtgcgcatcgagatcctctacagcggcatctgccattccgacctgcaccaggcccgcgatgactggggtggctcgatctacccgatggtgccgggccacgagatcatcggccgggtgaccgaagtcggcagcaacgtcacccgcttcaaggtcggcgaccacgccggcgtcggctgcatggtcgactcgtgccgccactgcgacgcctgtgagcacgatctggagcaatattgcgccgaaggcgcgacctggacctacaacggacgtgaacgcgaaaccggcgcgccgacctacggcggctattccgaccacgtggtggtcgagcagcgcttcgtggtgaaggtgtccgacaccctcgacctgaaggcggccgccccgctgttgtgcgccggcatcaccacctggtcgccgctgcgccactggaaggtcggcccggggcagaaggtgggcgtgatcggtctcggtggcctcggccacatgggcgtgaagttcgccaaggcactgggcgcgcacgtcgtgatgatcaccaccacgccggaaaagggtgccgatgccaagcgcctgggcgccgatgaggtactggtctcgcgcgatgccgcgcagatgaaggcgcacgccggcagcttcgacttcctgctcaacaccatcccggtcggccatgacaccaacccgtacatgggcctgctcaagcgcgaggccaccatgtgcctggtcggcgtgctgaccgaactggacccgccgctgaccggcggcagcgtgatcttcggccgcaagcacctgaccggctcggcaatcggcggcatggccgaaacccaggaaatgatggacttctgtgccgagcacggcatcgtcagcgacgtcgagatcatcgacatcaagaacgtcaacgaagcctgggagcgcatggcgaagaacgatgtgcgctaccgcttcgtgatcgacatggcgacgatgcagaacgccgcctgatccagggcagatgcgaaaaagaaaaaccccggcaatgccggggtttttcttctggtagtgccggccgctggccggcaaccccatacatctgccggccagcggccgacactaccgcaatccactcagtacgcgaactcgcggaacaccggatcgacgtcgccgtgccagcggccatggaacagcgccagcttgcgctcggccggggtcaggccggattcgacgatctcctgcagcacgtccaggaacttgctctcgtcctggccgtcggcattgcgcgccgcacggcgcctgaggccttcgacggaaatcttcaccgcttcgcgggccaggtcgcgcaccgtgccattgcggaacggcaggttcatcgcatgcttcggcacgccgtcgcgcagtgcatggcgctcggccagggtgaaatcgcgtaccaggtcccaggcggcatccagtgcggtgtcgtcatacaacaggcccacccagaatgccggcagcgcacacaggcggctccacgggccaccatcggcaccgcgcatttccaggtacttcttcaggcgcacttccgggaacgcggtggtcatgtggtccgaccagtcgcgcagcgtcggcagcgcacccggcagcaccggcagcctggcctgcatgaaatcgcggaagctctgcccgctggcgtcgtggtagatgccatcgcggtaggagaaatacatcggcacgtcgagcaggtagtcgacatagcgctcgtaaccaaaaccatcctcgaacacgaagtcgagcatgccggtgcggtcggcgtcggtgtcggtccagatgtgcgagcggtagctcaggtagccgttgggcttgccttcggtgaacggcgaatcggcgaacagcgcggtggctatcggctgcagcgccagcgacacgcggaacttcttcaccatgtccgcttcggtggcgtagtccaggttcacctgcaccgtgcaggtgcgggtcatcatgtccaggcccagcgaaccgaccttgggcatgtacgagcgcatgatcttgtagcgccccttcggcatccagggcatttcatcgcgcttccacttcggctggaagcccatgccgaggaaacccagctgcagttcgccggccacctgtgccacttcgttgaggtgggtgccggtctccacgcaggtctggtggatggtctccagcgccgcgccggacagctccagctgaccggccggttccagcgtcaccgaggcaccgtcgcgcagcagcgcgatcgtgttgccgttttcctgcaccggctcccagccgaagcggaccaggccgttgagcaacgcttcgatgccgcgctcgccctcgaaggtcggcgggcgcaggtcatccaggcggaacccgaacttctcgtgctcggtgccgatgcgccactgcgcgcggggcttctcgccggaggcgatcacctccaccagctgcgagcggtcggtaatgggggtatcggcgacgtggctggggctcgacaaggggaaggctcgctggacggtggcgggggatgtggggctcgcggccttccatcgcaagggcgcactatagcgtggcaccccgttgcgtcatgcgacggtgacgggtttcagcatcctaccgacgccctcttgaccctcgtacactcggcgtcatgaaccgtcattcgcgacaccccgaactgcaccgctccgagcgcgtcggctggttgcgtgccgccgtgctgggggccaacgatggcatcgtctcggtggccggcctggtggtcggcgtggcggccagcggcgcctccgccaccactatccttgccaccggcgtggccggcaccgtggccggcgcgatgtcgatggccgccggcgagtatgtgtcggtgcagacccaggccgacaccgaagcggccgacctggccatggaaaagcgcgagctgcgcgaagacccgcacagcgaactggaggagctggccgcgatctaccgccaccgcggcctggagcctgcattggcccggcaggtggccgaacagcttaccgcccacgatgcactgggtgcacacgcccgcgatgagctgggcatcactgacaccctgcgcgcgcgcccgctgcaggcggcgctggcctcggccggtgcgttcacctgcggtgcggcgctgccggtgctgaccgccctgctcgcgccgaccgacaaggttgcgttgatgaccacggccagcaccctgctcggcctgtgcctgaccggcgcggtggcggcccaggccgggggcgcaccgcctgtacgcggcgcggtccgggtgatgttctggggcgcgctggcgatggctgcggcggccggcgtcggtcgcctgttcggtgcccaggtgtcatgaccggcatgctgccagcggccactgcgttgttggccgagatggccagcctggccggctgcgggcgcgccgagggctatgcctgcatcaccgcacgccgcgagcatggcgccagctcggtggaggttccgcaaccgcagttcgcgatcctgctggaaggccgcaagcaggtacgtaccgcacaccagtcgctgacgttcgttcccggcgacatcctgctgctgacccagcggtgccgcatcgacgtggtcaacacccccgatccctgcagcggccgctacctcagtgccatcgtgccgctctgcaccgaagtgctggcggcggcgcgtacgctctggaatgaagagcttcccgcccccggccaggcgatggcgcgactgccgttgatcgaccatggcgcggtgctgcgccagtggcggcaatcgctgcaggacggccgttacagcgacgcgcggctggccctggcctcgctggtgctgaccctgtgccgacagggccacggcaacctgctgctgccgcaggcgccgagccagggcgaacagatccgcgaccgcatcgccgccgaaccagcacgcgactggcaatcacgcgatgtggaagaacagttcgcgctgagcggcgcgaccctgcgccgtcgcctggcggccgaggacaccagcctgcgccagctgctcaccgaggcccggctggcacatggcatgcagctgctctacaccaccgacctgccgttgaagaccgtggccgcgcgcgcgggctaccggtctgcggccagtttcagcaagcgcttcgccgagcagtacgggctggctcccacagatatttgagggggttcggcagggctgcgccctgcacccgcagaggcaacggcaacagccgaagcaacagcaacagcaacggcgtgcattccgtggaatggcggggcactgtgggtttgcggggacgccgtaaacccgtccatgggggcttggtcgccgcatccatgcggctcacaccccgcaaacccacagtgccccgccttcgacagattccggcggctgttggtaggtgtcgaccttggtcgacacatctgtcagttatcgaatgaaattcgtggggtcagatccgttttcctccggaaaacggatctgaccccaagagcatttccaacagacagataacagaaaactgtcgaaggcggggtgggtccggttgcgagtgtccgcggcatggatgccgcggccaagcccccatgggtgagggcgctttgcttgcgaagcactgcttcacaagcgcccgaacgcccagccgccagcgactgggccggaccgcggagcggggtttacggcgtctcccgcaaccggacccaccccgccatcccagatagcccgctgtcgctgttgctgttgcttcggccgttgccgttgcctctgcgggtgcagggcgcagccctgcagccccccccccttccctgagcattccgcgcagtggtttgagcgccgtgcacacgccggccacggcacgctgggcacaacggaaccgcccgtcatccaccgagaaccgccatgatcctgcgtcccctgccgctgcgcggcgccctgctgctggccctgtcgtccctgccgctggctgcactggccgaagccacctcgcccgctcccacccagcaggtgcccggcgtctaccaccagcgcgttggtgcgctgcaggtcaccgccctgttcgacggcgtggtcgcgctgggccggcaggaagtggtcaacgtgccgccgacactggtcagccgcctgttggaaggccgctacgtaccggaagacaagaagggcctgcagaccgcgatcaacgccttcctggtgcgccagggcaaccacctgaccctggtcgataccggcaccgcgcagtgcttcggccccggcctgggccaggtgctgggcaacctgcgcgcctccggcgtggacccggccgaggtggacgaggtgctgctgactcacgcccacccggaccatctgtgcggcgtgctcgacgcgcagggcaagccggcctacccgaatgccacggtgtggctgtccaaggccgatgccgattactggctcagcccggccagcgaggccacggcgccgaagggcgtgcgcttcgccttcccgctggcacgcaacgcggtcgcgccctaccaggccagcggccacctgcgcacgttcagccccggcgatgccctgcccggtggcgcggtggcgatggacacccacggccatacccccggccatgtctcctaccggttcgacagccagggccagtcactgctggtgtggggtgatgtgctgcacttccatgcggtgcagttcgcgcacccggaagcggcattcgaggccgattcggaccgcaaggcggccatcgccagccgtcgcgggctgctgcagcaggccaccgccaacggttggtgggtggccggtgcgcacctgccgttcccgggcctgggccatgtgcgtggcgagggccaggcctatgcgtgggtgccggcggagtattcgccgttgtgagggtgtgccgaccaaggtcggcacccacccgatcgggtagcgcccggctgccagccgggcgaccgtaaatgccttattccagccccagccagccgccgatcacgccgcgggcttcgtccacgccggtacggtcttcgccggagaacacctgcacgctgacgctgtcaccgtaagccgattgcagctccttgcgcaccttctgcagggactgcatctgctggctgcggctgagcttgtcggccttggtcagcaacgcgtgcgccggcaggccacgctgcacggcataggacagcatctgccggtcgtagtccttcagggggtggcggatgtccatcaccaccaccaggcccttgagggcctcgcgggtgcggaaatacttgtcaatgaaggcctgccagtgcgcctgcaggtccagcggcaccttggcgtagccgtaaccgggcaggtcgaccagatgcgcttccggggtgacctggaagaacaccagctgctgggtgcggccgggggtcttggagacacgggccagggcgttctggcgggtcagcgcgttgagcgcactggacttgccggcgttggagcggccggcgaaggccacttcagccccttcgtcgggcggcagctgccgcacgttgtgggccgaaaggtggtaacgggcgcgttcgatgagcaatgacatgtgcctaggatcgcatgttgcggcgccgcgcgcccgtgccggcggccgctgcggccattttgctgcactgctgcgttgaccgtgcgcggaaacggcgttgataatccgggcgatgccggcggccaccgtccggcccggtccatacggagcttcagcatgcgccacgctcgcgttcttgccgtatccgcccttgccactgctgtagtcgttgccgctgctgcgttcgcgcagaccacgttgaccccgctgcccgacaacgggccgatcaataccgcctcgctggaggtggacttcagcaagacccactggggcgatgccaaggccggccagaccaaggcgacggcctgcgcggcctgccatggtgccgacggcaactccacggtggagatgtacccgtccattgccggccagagcgagcgctacgtggcccagcagatggccctgatcgccaacggccagcgcagttccggcgcggcggtggcgatggtgccgttcgtgcagaacctcaccccgcaggacatgcgcgatatcggcgcctacttcgccacgcagaaggccaacgccggcatcgccgatgacacggcagtgaccgatggcccctacaagggcatgaagttctacgagatcggccagcagctgtaccgcggcggcgatgccaagcgcggcctgccggcctgcatggcctgccacggccctagcggtgcgggcaatcccggcccggcctatccgcacctcggtgggcagcacgccagctatgtcgcgcgccgcctgcaggagtaccaggccggccagaccaacgagaccgacaaggcgcacttccagatcatggccacggtcgcgcagaagctcagcgagcaggaggtgcaggcgctgtcgagctacctgcagggcctgcacaacaaggccgacgatgtagccgctgcggccacgccgacgcaaccggctgccgccccctgaccaccactggtcggcccgggccgcgacgtcggcccacggctgcggtatgtttccttcacgccggcggctgcgccggcgttgcttttttcaacggagatgcgtgtcgatgaggttgatttcccgcctgctgttgtccgtgctggtgctgctgccgctggcagcctgcgccgccacccccgccaatgccccgctggtcgagggcaaagactacgagcgcatcgcccagccaggcccgttccagccgctggccggcaagatcgaagtggtcgaggtcttcggctatacctgcccgcactgcgcccatttcgaaccgcagctggaagcctgggcggccaagctgccggccgacgtgcgtttcaccccggtgccggcggccttcggtggcgcctgggatgcctgggcactggcctactacgccgccgacgaagtcggcgtggccaagcgcagccacgctgccgtgttcaaggccctgcacgagcagggatcgctgccgatgcagaacgtctcggccgatgagctcgccacgttctacaaggcctacggcgtgaccccggaccgctacctccaggcgctgcgcggcgatgccgtgcagaagaaggtcgaggccgcgcgcgcgttcgcccagcgcaccaagatcccgggcaccccggccatcatcatcaacggccagtacctggtgcggggcaacagcttcgacgaccagctgcgcatcgcctcggcgctgatcgcgcaggcccgcgccgcccgcggccgctgaaccaacgcccaccctcgacacggcgctgtcgccgccgcatgtcatcatttccccctggctggcgcctggcgccggcccccacctttccagatgctggagacgtttccatgaagatccgttacgccctcgccctcgcagcgctgctgccgatcctggctgcctgcaaggctgatgacggcagcaccaacaccaccgcggccccggccgcaccggcagccgccccggccaccgccgaaccggccgctgcgccggccacgggcagcgaaggcaccgctccggctgccgccgaaggcgaaaaggccccggccgaagccgcccccgccgcggcgccggccccgaccaccgccgcgctgaccggcccggccccggtggaaggcgccgattaccaggtgatcccgaacggccagccgttccagccggctgccggcaagatcgaagtgaccgagatcttcggctacgtctgcccggcctgcgccgcattccagccgctggtcggcccgtggaaggccggcctgcccagcgacgtgaacttcgtctacgtgccggccatgttcggcggcacctgggatgactacgcccgtgccttctacgccgcgcagaccctgggcgtgcaggaaaagacccacgaagcgctgtacgccgccatccactcgcagaagaccctgaagggcgagcgcggccgtgactcggtggaagacatcgccaagttctacgccgcctatggcgtggatccgaagcagttcgccgccaccatgggcagcttcgcggtgaacgccaagaccaactcggccaagcagttcgcccagcgcagccagatcagcggcaccccgtcgatcatcgtcaacggcaagtacctggtgaagggcaagagcttcccggacatgctgcgcatcgccgaccacctgatcgcccgcgaacgcggtgcggcccaggctcactgatccaacagaagcatttcccggccgtgaattccccccgtacacggaccctgcgcttgctgacggccaacatccaggccggctcaagtacccgccgctacagcgactatgtgacccgcagctggtcacatgcgctgccggcggggcgcaagcgcagcagcctggacgcgatcgccaccctggcgcgcgaccatgacatcgtcggcctgcaggaggccgacccgggcagcctgcgctcgggcttcaccaaccagacccactacctggcccagcgcgccggcttcaactactggagccaccagccgaaccggcgcatgggcggcgtggcgtccagtgccaatggcctgctgagcaagctggaaccggtggaagtgcaggaccatgccctgcccggccgcatcggcgggcgcggcgtgctgctggccaagttcggcgatggtaccgatggcctggcggtggcggtggcgcatctgtcattgggcgcgggctcgcggatgtcgcagctgggcttcatcgccgagctgctgtccgaccaccccaacgcggtgctgatgggcgacttcaactgcctggccgaacgcccggaaatgcaggtgctgtaccagaagacccggctgcagcccccgggctgcatcgtgccgaccttccccagctggcgccccgaccgcgccatcgaccacatcctggtcagcagtggcctgcagactcgtaccgtggaagccgtaccagccgcgttctccgatcacctcgccctggcgatgcagatcgacgtcccggccgacaccctgcgctgactcgcccttacggtaggtgcggaccgttggtccgcacgctctgcgccgggcgccgcccggcgccccctaaatcggggcataaacgacttaatcccctccgtcccctttttttcaggcggtgacgggtgccttcaggcgccgcgcggtcatcgtgctgcccaccgaggccagcatcgtgcagccgatcgccagccactgcagcccatgcaggtgctcgtgcagcagaagcatggcccacagcgcggccaccgccggttccatgctgatcaggatgccgaaggtctccttcggcaggcgcttgagcgccatcatctccagtgacatcgggatcgcgctggacaccagcgccaccagcagtccggcggccaggatcttcgggtcgagcagcgcggcaccggcatgcaccacgcccaccggcaccaccaccagggatgccgccagcagccccagcgacaccgaatgcccggcgtgcaggtggccggcacgcttgccgaacacgatgtacaggccccagcacgccgcagcacccatcgcatacagcacgccggccggatccagcgccgggccgccgccgatcggcagcagcaacagcaaccccaccgccgcacagcccacccagaggaaatcgatcggtcgtcgtgacgacagcatcgccaccgtcagcggcccggtgaactcgatggccaccgcgatgccgaagggaatcgtacgcagggccatgtagaacagcaggttcatcaggcccagggtgagcccgtagcgcaggatggtgatcgcatccgcgcggctggtcttccagcgccacggccgccagaacagcagcaacaacagcgccgagaagcccacgcgcagcgcgctggtgccctgcgcgccgatcagcgggaacaggtgttttgcgtaggaggtgccgatggccagcgaggtgaccgagccgagcaccgccagcgccggcaacatcggcgcgagtcgtggggtccgcatgggcaaagtctattgcgccagcgccgagcacttggctcaattgacggcccgttcgtgcaacttctgctcgccatggccaccgcccccgtgctcgacagcttcgaccgcgccatcctcgacctgctgcagcgggacaacaccctgccgcagcgcgaaatcgccgaggccgtgcacctgtccacgccggccgtgcagcgccgcatcaagcgcctgcaggacagcggcgtgatcgcggccaatgtggcggtgatcgccgccgcccaggtcgggcggccactgaccatcatcgtcgaagtgcgcgtggtcagcgagcagcgcgaccgcgtggcgccgttcaagcgccgcgtgcaggacgacccggcggtgcagcagtgctacgcgatcaccggcgatggcgatttcctgctactgctttcggcggcgtcgatggaagagtacgaggccattaccgagcggttgttcggcggcgatgacaacatcgagcgcttccgtacgtcggtcgcgctggggacgttgaagcgcagtttcgaagtgccgctgctgccaggcctgtagagtcgagccatgctcgactgcctcctgatcgcaacgcaacagcagtcgagcatggctcgactctacactttgaaaccatgagtacaccgccctcccccacccgtcgcctgcgccgctggttgctgcgcggcctgtggctggccatcgccctcattgccgcgatggcgctgtggaacagcccatgggccgctgcgccgaagctgctgtggacactctctcgtatgccgccggccacgcaactggcggtgccggtggacggcgtgcggccacgccagatcgccgacaccttcggcgcaccacgtggccgtgaccgctcccacgccggcatcgacatcttcgccaagcgcggcaccgcggtgcgcagcgtcactgccggcgtcatcgcggacgtcagcgagcgcggcctcggtggccgccaggtctgggtgatcgggcccgggcgcgaacgttactactacgcccatctggacgactgggccgagggcctggcgcgcggccaggtggtccaggccggcgacctgctcgggcatgtaggcgacagcggcaatgccaaaggcacgccgccccacctgcactggggcatctacggcgccgatggcgcgcgcgatccgctgccgctgctgcgctgaacaccatgcgctgcgtcgcggcccgcgtgagcgcctacctcgttcatgatttgtaaataggaatagttcgtattaccatttctttcgtttccggtggtgccaggacggcctgcccgcccgtttcccacccgtagcgcctcgccttctggatgccggccgagcgcgcgtgctcgtccaggacccccatgacctgttccgccttccgtatcccgcagccgcagcggctgtccgttgccgtactcgttgcactctgcgccctggccccggccgccttcgccgacaccgccgccgacccgaccacgctggacaaggtgatggtcaagggcgaacgcgccgaaggctattcggtgcgccgcacctcggccggtacccgcttcgacctggcaccgcgcgagatcccgcagtcggtcagcatcatcagccaccagcgcatcgaagatcagaagctcgacgacatcatcgacgtgctggccaacaccaccggcgtgaccagcacccagtccgacagcgagcgcaccgagttctacgcgcgtgggttctacatcgatgcctaccagttcgacggcctgccgacgcagatggtgcagaactggagctacggtgactccggcctggatctggcgctgtacgaccgcgtggaagtggtgcgcggcgccaccggcctgctcagcggcgccggcaatccgtcggcgtcggtgaacctgatccgcaagcatgccgacagcgccgagctgaccggcagcgtctcggtgaacgtcggcagctggggccgcacccgcaccacggtggatgtgggcagtgcgctcaacgccagcggcagcgtgcgtgggcgcgtgatcggcagctacctggataccgacggccagatggaccgctacaaccagcgcaagacgctgggctacgccgtcattgatgccgacctgaccccggacacccagctgagcgtgggctacgactaccagcagaagcgcgccaacggtgcgacctggggcggcttcccgatgtggtacgccgatggcagcccgaccaactacccgacctcgttcaatccgtcgccggactggacctactgggacaccaccagcaagcgcgcgtttgccaccctgcagcacgccttcagcaacggctggaagttcaggatcggcgccacccacgaccgcaccaacgccgacgacaagctgttctatccgtcctacaccgcgttcgacaaggccaccggcaccggcgtcacgccgatggccggcttctacaacaccgagcgcaaggtcgatggcatcgatggctacatcgacggcccgttccagctgttcggccgcgagcaccagttcatggccggcctgagctacaacaagcgcgaattcgccaactacggtgacttccagatgggtggccccggcaccggctggaatcccttcagctcctatctcgactggaccggcaacatcgcccagccgaactggaacccgctggcgctggccagccagggcaccatcacccagaaggccggctatgccgccacccgtctgtcgctggctgatccgctgaagctgatcctcggtgcgcgctacaccaactggaagagcgaaggcgagaacgacgaccgcgaacacaaggtgaccaccccgtacgccggcctggtgtatgacatcaacgatacctactccgcgtacgccagctacaccgagatcttccagccgcagaccgcacgtgaccgcaacgaccgttatctcgacccggtcgacggcaagagctacgaggtgggcgtcaagggtgcctggttcgacaaccggctgaacgcctcgctggcggtgttccgcatcgagcaggacaacgtcgcccaggtcaccagcgagccgatcatcggccgtccgggtgagttcgcctcgatcgccgcacgcggcaccgtcagccgtggcttcgaattcgaagtgaacggcgaactggcaccgggctggaacgcgaccttcggtgcttcgcgctatgtggccaaggacatcaacggtgccgacatcaacaccaacctgccgcagaccgcattgaagctgttcaccagctacaccccgcagtcgctgcaggaactgaccatcggtggcggtgccaactggcagaaccgcatctattacgccgcgccggtggtgggtcgcttcgagcaggaaggttacgcactggtcagtgccttcctgcgctaccgcatctcgccggagttcagcgtgcaggccaacctcaacaacctgctggacaagaagtactactcgcagatcaccggctacggtgcgtacggcgatggccgcaatggctcgctgacgttcacctgggcgttctgatcagacgcggggttcgcacgccccgcacctgtagagccgagcccatgctcggctcagagaatcagccgagcgcgggctcggctctacacccgcaaggcagcgccggaactgaccggcgctgccaacgtcacatcagaaccgcaggtccgcgcgcaggtaccagtaacgaccacgcggaatgtcgtaggtcgaggcgtcatacccgttcaacgagcacgacaggcagatcggcggatccttgtcgaacacgttgttcaggccggcggtcagctgcaaccccttcatccagtcgatcttgtagcccacctgcatgtcgtggaaggtggtggccgacagcgtgttggtgcccgcggcctggttgctgcacaccgggaaggccgccgcatcgccgcagttctcggtcagctcggagatgtggcgcaccgtccagttggcgctccagcgatccatcgtccagccgaggctggcattgctggtccactccgggatcgagctgtcggccacttccacgcccggcttctgcggctgcttctgcccggccgcgccagtggcctcgtaacggccgacgaaggtgttcttccatgccagcttgaactggccgatggaggtctgcggcagcgtccagaacagatccacgtcccaaccgtcggtcttgatcgaacccaggttggtcaggcggttgttgaagctgctgaccgcaccggtgctggcacgggtgatgccgttgcagtagatcgggtccagtgtatccacgcacaggtccagctgggtctgcgcgttgatggcctggatcgcaccatcgatggcatggcggtagaaagtgacttccacatcgaagcgctccgaccacgaggcgttgttgccgaaccacgggctccacacgaagcccgcgctgaagctgcgcgagcgttccgggtccagctcgcggttgccgccggtggtcaccgagatctgcgagttggcctgctggaagccggccgggacgcccagtgcagcacagttggccgcgctgccacgcggcggcgtgccgcccaggcccaccgagcacggatcgaacagctgcaggtcggcacgtgcggcagagccgtacagctcaccgatggacggtgcgcggaagccctcggcgtacgtggtgcgcagcacgaagtcatcggtcacctgccagcgcaggccgtacttgggcgtgaactcgccgccgaaggtggagtagtccgaatagcggccggccaggctcaggtccagcttcttgccgaacgaggagtcggcgaagatcggcacgctcaactccaggtaggcctcgttgacgtcgtaggaaccggaggtcggttgcgacggcacgccgttgtagtggccgatcaccgtcagcggatcgggctggtaggcgcccttgtacttgcggtactcgaagccggtggcgaaggacaccggaccggccggcagcgagaacagctcgctggacaggttggcggtgaacaggctcagttcgttctggctgcggtcgcgcaccaccggctggatccacttcagcatgtccggggtgatcgaaccggcgccaccgaagatgttcaacggcacgcagccaggcgtggccgcgcacaccgcgggatcgcccagcgccatgttcaccttgtagatgtcatagctgccgtagttggtctgctcggccttgttcttgctgtacatgccgttgacgtcccagtaccagctgcggtcggcggcatggaagtcaccgaccaggccggtggcgaagtaggtggtgtccactttctgcttgaacacgcgcgcaccgccctccaccgggcgacgaccgatcaggctcatgttgtcgccggagacgagatcgaagccgaacgggttgtacgggttcaggcgcgagaccacgatgttgtcggccaacggattgccggtggcgccatcggggccgaagaacagcggctcggggccggcctggttggtcgactcgcggcggttgcccagcgccttgatgtaccactgcacgttgtcggtgatgtcaaagcggaactggccgaacaggcctttgcgctccgacggcgtcagcaccatgttgtattcggcgaagttgaagcggtcggcggtggtgaagcagtgatagtcatccgtgcggctgcagccggcactgccgtcgtaccgcggattgctcacgccggtattgggcacgatgttctgcaccgcaccggtgttcgggtcggtgaacatgaaacggccctgcggaataccaccgctgccgaacgccaggccggtaccgggaatggggaagcgcgactgctcgcgatccttggcgaataccgggtcctgcttggtccagctggcgcccaggaacaggctgaagcgatcgccactcttgccccaggccaggtccacgcccttctgcgtgccgtcgcccttgctgtactcgccgtagttcagcgtcacctgcccaccatcgaaatcgcggcgggtgatgatgttgaccacgccggcgatggcatcggagccgtacagcgacgaagcaccgtcctccagcacctcgatgcgctcgacgatcgccagcggaatggtgttgaggtcggtggccgagcccacaccggacgccgacgattcattgacccagcggatgccgtcgaccagcaccagcacgcgcttggcacccaggtggcgcagatcgacctgcgccgagccggcacccacgccactgccatcgggcgggaaaccgaagttgccggacgagttgaacttggcgttgagcgcagagccggaaccggtgagctgctgtagcacttcgccgatcgaggtcaggccggtgcgttcgatgtcgccacgggtcagggtctggatcgggacctggccctctacttcagcgcgcttgatgcgggtaccggtgacttccaccgcgtcgaggttggtggtggattgtgcagcggcacccaggggtgccaaggccatcacgcacagcgtgacggcaaccgccaacgggcggtggtgcaggtgcttcattcgctctctctccaaaggaatgtcgggacatggactgccgcgctcccccctgcatggcggcagcgtctcctttgtaaacaagcggtaaaaatcacggcgtgatgatcgacactatttcacgcggaattgacgcaattgacagccatttacgtcagatgaggaccgtttagaaccggacggtactgttcaccgccctccactttgatgccggctgcgtcagcgcgcgccgagatccgccacaactcatcaaggggacttgtcggtgcaggcgctagtgaccgggcgcgtcgacgcgcagcccatgctggctcacggccagcagcacgcgtgccatgtcttcgtagtcggtgtcgtcggcggtcgccaggtgcacccaggggcgatgctgctgcggcatctgctgcgcctgcaccaggtgccgctgcaacgcgacagcgtcgagcggctggccattccagaacatcgcccccgccgcgtcgatgcgcaggtggatcggctggggtgaggacgccggccagggtgggcacgaggtgcgctgctggagcgccaggaggccggtcgcctgcgccatcggcagcgcggtgatcaccagcgccagcaacaccagcaacacatccaccagcggtgccagattgggggcggccatcagtgaggccgcgtgctgtgtcccgtatcgcatgccacgttccctcgcaggaagagcggcctgccgatggcaggccgcccgttgccggactcaccgcacgaaactcaccgcacgaaggcaatgcgctccatgccagtggcttcggccgcagccaatatccgcgccatgccttcgtactcggccgccggatcggtggcgatgcgcagctccggcaggttgccggcatgctcgccggcctgcgcctgcaggcgcccctgcagatcgccgatcgccatcggctggccatcccagctcagctggttcgacgcatccagtcgcagctcgatcggcggcggcggttcggggcgatcgatcgtgcgatcggtggcctgtggcaactgcacgggaatcggccgggccacgatcggcgcggttacgatgaagatgatcaacagcaccagcatcacatccaccagtggcgtgacattgatgtccgccagcgggccgcttcttcctgcgctactgaacgccatgtgccgctccctgcagccgggcggttcgcccaaggccgacgttacgacgcctgcgcccgcctgcggcaggggcctgtgcggagtcattcagctatcgttgcccacgcatggcgtgcacgcaatgcgaaactgaattcagccactgcccgctatgctgcatgccatgacccgacgctcttcgaccgccctgtccctgctgcccttggccaccacgctgctgatcggctgcgccaatgcccagtccctcgatgcccagaacgcgcagttgaaagccgcgatcgcggccgccgaacgcggccagttcgatcctggccaggccgctgcgctcagccgccatccggcgtatggctggctggagtacgccaacctgcgccgcaacatcgacaccgtcgataccgcgcaggcacaggccttcctcaagcgctatgagggccaggccgtggccagcacgttccgcagcgtgtggctgccctcgctcgcccgccgccaggactggccgaccctgctggccaactgggcgcccaccgacaacgccggcctgcgctgtgcgcagctgaccgcgcgccaggtgaccggcaaggtcgatccgcagtggatcagcgaagcacaggagctgtggcgcaagaacggcaagccgctgccggacagctgcgatgcggtgttcaccgtgctgcaggcacaaggcggcctgagcgacgccctgcgctgggaacggatcgatgctgccgccgacgcgcagcagcccgccgtgatgcgcagcgcggcccgcggcctgcctgccactgacctggcactggccaacacttacgccgccttcgtcgacaagcccaacgccagcgccctgaactggccccgcaacgagcgcagccggcgcatcgccaccgatggcctggccaagctggccaaggccgacccggccgccaccgaacagcagctgccgcagtacgcgcaggcactggggctgagtgccgcccagcagggccaggtgctgtaccagatcgcgctgtggacggtggcgtcctacctgcccgattcggcacgccgcctcaacgcggtgccggagtcggcctatgacgaacgcctgcacgagtggcgcgtgcgcgaagcgatgtcgcgcggcgactggaccgcggcgctgaccgccatccgcaagatgggcagcaagcagcgcagcgacccgcgctggcgctacttcgaaggccgcatgctggagaagaccggccaggcccagcaggcgcagccgctgttccgcgaggccgcgcgtgcatcgaccttccacggcttcctcgccgccgacaagctgcagcagggctacacgctgtgcccgtggcagcccaacgacagcgcgcaggctcaggcggtgatcgcgcgcgacccggccatccagcgcgcgatggcgttgtaccagatcgatcgcgctggctgggccgtggccgaatggaacagtgcactgtcgcgcttcgatgacacccagcgtcgcctcgccgtgcgcgtggcgcaggacaacggctggttcgaccgcgccgtgttcgcgctcggcaagcagccgcaggagcagcgcctgtacgacctgcgcttcccgctgcaccacgacgccaccatccgccgcgaatcagcacgcaacgcaatcgacccggcctgggtggcggcggagatccgcgccgagagcaccttcaccccgcgtgcgcgctcgcctgccaacgccatgggcctgatgcaggtgctgccagccaccggtgccggcgtggccaagtcgatcggcctgaccggctacggcggcgccgacagcctgtacgacccggacaccaacatcgccatcggcaccgcctacctgcgccagctgatgaacaagtacgacggcctgccctacgtgaccatcgccgcgtacaacgccggcccgaccccgaccgcacgctggcagagccagcgcccgggctttgatccggacctgtggatcgagaccatcagctacaaggaaacccgcgagtacgtggcccgcgtgctggccttcagcgtgatctacgactggcgcctcaatggtgatgcgctgccgctgagcgatcgcctgatgggccgcctggtggacaagcgcaagcgcttcagctgcgccgccaacgccgaccagggcggcgattgatcgcaacacagtactgccggccgctggccggcattctccggcatccactcgctggggagggaaacgatgagcctgctggcctggatcgggctggacgctgtatcggtagtgcaggccgctggccggcagcttcggggtgactgcggttgccggccagcggccggcactaccggtgcgtctgcgccgggcatgcgatgattccagccatgaagatctatcttgtcggcggcgccgtgcgtgaccgcctgctgcagcgacctgccggcgaccatgactgggtggtggtcggcggcacgcccgcgcagatggaagcgcagggcttcaccgccgtcggccgcgatttcccggtgttcctgcacccgaagaccgctgaggaatacgcgctggcgcgcaccgagcgcaaatccggccgtggctaccgcggcttcgtggtcgatgccgacccggcagtgacgctggaagaagacctgcagcgccgcgacttcaccatcaacgcgattgcctgcgacgaagacaccggcacgctggtcgatccctacggcggtgtgcgcgatatcgagcaacgcgtgctgcgccatgtcggccccgcgttcgtggaagatccattgcgcgtgctgcgcgcggcccggttcatggcgcgcttcgcaccactgggcttcaccgtcgccgaagagaccatggcgctgatgcgcgaggtcgccgccagcggcgagctggacgcgctggtgcccgagcgcgtctggcaggagctgcgcaaggcgctggtcagtgaacggccctccgccttcctgcgcacgctgcacgatgcgcaggcactgggcccgatcctgcccgagctggaagcgctgtatggcgtgccgcagcgtgccgaattccacccggaagtcgacaccggcatccaccaggaaatggtcagcgacatggccgcgaaactggcaccgggtgatgacctggtcggcttcgctgccctcacccacgatctcggcaagggcctgaccccgccggaggaatggccgcgccacatcatgcacgaacagcgtggcatcaagccgctgaaggcattgtgcgcgcggttgaagattcccaccgagcaccagcagctggctgaagcggtgtgccgcgagcacttgaacgtgcaccgcatcgatgaactgcgcgatgccaccgtgctggaactgctgggccgctgtgatgcgctgcgccggccggaacgcgtgacccgcatcgcactgtgctgcgaggccgacaagcgcggccggctcggcttcgaggacgccgactacccacagggcgaaacgctcaagcgcctgcaccaggcggcgctgtcagtgcaggcgcgggatctggataccacgcatctgaagggcccggccatcggcgaagcgctggccaaggcgcgggtgaaagccatcgccgccgcccgctgatccgcaacgtccgcgcgcactgctatgggcagtgccggccgctggccggcacccctatatcactggcttcagtgcgccatcccacgggtaatcgccgccgcacgctgcttcagctgggccacggcatcgggaatcatctccatgcccacgtccaggcccgggttcagcaccaggccgacgccgtcgccgataccggccagcagcgcgtgcaccgcgatcggcatggcatgggcaaactgcggcagctgctcgtgccacaggccagcgcgctcgggcgcggtgaacaccgcgaacatcggctcgccgctctcgctggtcagcaccagcggcgagatgctctcgtcccaggcgccatcctcaccaatggccttgtccagcagcacgaacgccgtcgaggtcagcaggccgtcgaggaactgcgctgcggtcagcgtgccgtcctgggcctgcagcaggcgcacctcgaggtcgttgaggggttcgaacggggtgtcgtggtccatggtcggttccggtacgtggttgcagggcagactttaacaggcccggtcctcaaccgatgtatccgtgccgccacatccaaccggccaccgccagcgcggcgacccccaccagcatcaacggcaggccgaagcggtgccgccacgggatcggcaccccgcccagctgctggtccatggtctcggtatcgagcacccagccgtgctcgcaccgggtgcaggccagctcgtagcggcgctggtaggtgaagccgaacagcaggtcgatgcgcgccatcttgtagcgcagctgcggcgcgaactcggtttccgtctggcagcgcaggcagtggtgcgcttcggtggggccgacgatcagcacccgttcctgttggccgatcaggatcatgtccggttgccctggcaggcgggctgggccagcagccaggcctgggcggcggccacagtggcggcatcaccctcgacgcgctggtcgggttcgatcttcaagccatcgccacgatcattgcggtcccgcatcacgctggtggtcagcagcaggcgacttccatcggcaagggtgtgcacgacattgccggtggagacacccgcggtcggctggccgaaactccgcgcctgcgggcggccacgccacgccagcaccgaggcctcgcccgaactgccggtgcggggcccgaacagcaccgccaccggtgcgccaggctgccgcactacatggccggactggccgaagtccagcagcggcctgcccgccagctgcaccgcagtcgccgtcaacgtccagcgctgcggcccttgcgcggtttcgaacgcgccgacgtcctcgttgttcaccaccgaggtgcgcaacagcggggccatgcccagcagcatcggccacatggagccgccaccgttgtcccgcaggtcgacgatccagccacagcgcgcgccgtcgtccttgctgcggatgacctgctgccatcgcgcggcacgctggatgtcctggcggaatttttcctgcggcgtcgcgcccggcgaggaggcatagccctcgatgaccacccagccgatgcgcgcatccaccgcatcagcggccttggcccggtccacggcggcggcaccggcctgctgcgcacgcgctagggattcgcgctgacgctgggtcgtggtccacgcaccatggtggccggtgctgagcgcaatggcttcgcgcagaacggccagccgttgcgcgggatccccctgcgccgattgcaggcggatgcggatggcgggccagtccacccggtcgcgatacagcgcctggcgttcaagcaggttgaggatctcagcctgggcctccggcgagggcatctcgaccgcgcctggcgtatcggccatggcgccggtcgccagcaacacgagcatcagcgcgccgatgcgacgcactcccttgcgaacctgcatgcgacgcttccttgtcgttgaatcaggaccgcagcataaccggggcatgatcgcttgcgccacgcgcgaactgtcgtatctggcccggtcgcgggttgcagcaaggcggcttgcgtgcggtcaccacattgcaactttgcccatgccatcgcggcgcacaacgcgccaaggtggccccgtcggcgcttcctgcgctgaccgggattggcgtcctgaatcaaacatcgaagcgatcgatttgccgcatcaacggcaatcgcgacaatgcaccggcttgcccatggtgggcggtgcgtggggatcctcgtgatccgtcggctttttcgctttgattttgaccggcacgccaacccgcaccgcccgccaccttgcgcttcgcaggtggccttgcctcgtgaggttgccgccatgaacacgccctaccccgcctatccacgcctgcaggcactgctcggcgctgcactgcccggcctgcagctgtccaacgccgcagccgaagcgttggaagatgcgctcaccgaagtcgacgaacaggcgccgccctccgcattcttcgcgcggctgcgcggcatcgctcacagccacgcggccgacggccaggcgtggcgcgaacggcaactcagcgaggcgcgcggccgggacttggccgaggcaacgcgctgcctggcggcagtgtctgcgtgtgggggcgtgttgctggcggcgcagtcggcgcgcgagatggatgatgcgcaggcgcagtgtccgccgcaggtggaggaagggctgctacatgcggtggtcgtgttggccgatcatgccggggcgttggtggaaccggatgcatgcgcaccgctgttgtagagccgagcctatgctcggctgcgcggaggtcatggcgtcggtgggattcgtgccgaccaaggtcggcacctaccagagcggcgtcatggcgccggtgggattcgtgccgaccaaggtcggcacctaccagagcagtgtcatggcgccggtgggattcgtgccgaccaaggtcggcacctaccagagcggcgtcatggcgccggtgggattcgtgccgaccaaggtcggcacctgccagagctacgtcatggcgtcggcgggattcgtgccgaccagggtcggcacctgccagagctacgtcatggcgccggtgggattcgtgccgaccaaggtcggcacctgccagagcgggtcagccatctgcactaggcgctaccagtccgcacgcaggccgatgttgccttcaatgacgcggcgcttctcgttgcggtcgccgcccagttcgcgcgtgtagtcggccacggcataggcgctgatcgttcggttgaaacgcccgaccacacccacgccggcttccagcgcgcgtgagcgctgcgaattgacgatcacgtcgttgtcgaaacggatgcggtcttcaccagaacggccatgccagtaattgagcttgaaatacggctgccagccgttgtcggccaactggtaatcgcccgccaggcgcaggccgatgcggccggtccaggcgttgtcgttgtcgaagcgcacgctcgatacttcatcgcgacggtcatccagcgaagtgcgctgccagatcacctgcacctgcggttccagccaccatgcggactgcccgaagtgcagcagcggcttgcccgcctccaccgacacgctggtaccgtcgccgctcaggccgaagccgagcccacgcgaggaacgcacgcggccgtcgtagcggctctgcatcgccacggcgtcgatgtaacccccactgctgtcggtgaaggtccagtacaggcccacgtgcttgtcatccaggcggttctggcctacctgcacgttctcccagcccagtgccagacccgtggtcttgccctgcgcgcgggtgcggccaacgaatacgccgatctggttgcggtggttgtcagacgccgcagcccacacgtcgagaccggcctgcaggcccatcacatcgccatcgaagcccggctgcgcatcacccctccagtggatctcgctgctctgccccaccaaccggccccaggcggtgcggaatatgccctggttgtacagcaggcgctgttcgccctgccgctcgtggaaggtaccgaggctggccagcgaggtctcgcgcagcagcggtggcaccacggcgtaggcggcggtctccacgcggtacagcggcaccaccgcgccttcggccgggcgtgcacccggcgttggtggggtgccggtaccgggcaacgcaccgccggccaccggcacgtccggcaccgccgggtcgctgggcggcgccaccggcgccggttccggtggcggcggtggcggcgcggcctcgccggcggtcaggttcggatcggtagcgccttcaggcggcggcggcggtgccggggtgatcgccggcggcggtgcgaccggcggcgtcaggggcggtggcgtggcagtgccgccgccgttgggtgccggcgttggtccggtcaccagcgttgatcgcaggtaccagttctcgctggtgccggcgctgacaccacccttgaacaggaagtactcgtaggcaccggctgcaaccggtgcgaacagcgagaacgcgcccggcgcagtgcggccaccattcaaggcctgcaccaccaggatgccatcggccagcgtggcggcgccgctgccgccggcattgagcacgccgatgccggtggtaccggtggcggttccgccatcgatcaccaggcggtcgctgctggaattgtccgcgcccagcacggtacgcaggtacaggccaccgccgtcaccacggtagttgccacgcacggtgaacacgtcgcctgcgccggtgccggtcaggtcgatgcgcccggcattgaccatctccaccagtgcaccactgttgaacggacggactgcatggccgccactgcccgcgtagacggtgctggtgtcgtccacggtgagcgtgccggtgccggttccgctgtcgcccagcaccaggtcgccatcaaaggtcagctcggtgctgttggccaggctgatcgcctcccagttctggaagcggcccacgccggcagtcttgacgttgtggaagttgagctggtcgatgccaccgccaccgtcgaacagcggcaccgcccccaggttgccctggttgaggttgccgaggttggcgacgtcgttgtccggccccatgtcgatcgcgccgtagacgatgccgccgccattccagttgaaggtgtcgttgccggtactgagcagtacctgcccgcgcacggtgccgtcggtgatggtcacgctgtcgttgccgccgctgacgctgatgttgccgccgatataggcggtacccgagatgatgatggtgtcggtatcgaagccggtcaccacgttgccgtccacggtgccgccggactggtcccacaggttcttgtccagcttcatgttgacccggccgatgcggccagcggtcatccacgcctggtcaccatcctcgaacgcaccgatgatgcggccaccgctcatgcggaaggtatcgatgttgtcgccctgctgcagcgcgccgaccgtgccgccactcatgacgaaatcatcgcggccactgccctgcgccaccacgccggtgacggtgccgccggtgacggtcatctggtcatcgccactgccctggtcgacgctgtcgatcgtaccgttgtccagcagcagcgcatcattgccatcgccctgcagcacactgccgctgatgctgccagcctgcatgtccaggcgatcattgccggcaccgaactgcacgccggtgcgcccgctgatcgttccgcggttgaccagcacgctgtcgcccgcgccgacgaactgcagggcggtgttgttgccggtgctgatgctgcccgagttctcgacgcggctgccgccaccgagctgcaccgccacgccgcccaccgaactgatcgtgcccaggttggacaacaggtgcccaccggccccgacaagcgaaatcgcgctgctgccaccgctttgctgcagctgcgccgtgctggcgacagtgacggtgatgccggcggcgccattggcggtgacgggaacggtctgcgggttcggcgcattggcatcgcaggtgaccgtctggccggcgacgggggcaacgctgtcacagccggcccaggcggcgctggcggtcaacagcatgacggagggaacagccaaagcctgcagtacggaaacagtgaggcggcgcatacgcactgcgcgcgggacggcacgggacatacagcactcctggacaggggatcaggaactgcggatatgcggtactgcgagcgaagtctgcgccatggtgaacggtttcggcaggtgaatttgcgtgccgatcatcacagttcagatgcgaacctgatcgggcatcaccccacctctacgtgcctgaaatcgttcatctttgcggggtcatgcccatgcctggatgaggtggcctcccgggttgggtcagagccctttcctgcggaaagggatccgacccggagccgtcagatcttcagatagatcttccgccggtccagccaccacgccacgccccaccacagcgcgacgaacgccagcgcctgcagcatcgacgccagctcgagcgcgtgcggcatcgcggcggccagttgctgccagatccagccccacgcgccggtcgccatcagcgccaccgacatcaccgatgcgccaagataggcggtaattgcgttgaccccgaaacggcggcccagcggcggccatcgcttctggtcgatcaacacatggcccagccacagcgccagcgcggccaggccgccggtccacagcacatagctgggcgtccacagctgcttgttcaacggcagcaccgtggccagcagcagccccagcacggcggttgccacacccaggccagccaatgccgccgcacgaccgttgcgcagcaggccaccggcaatcaggccgagcacggtactggccagcgcacccagcgtgctcagcaatccttccgggtcatggcccagtccggtatcggcgtgccactggtagatccacggtgcgaacagcgtggtgtccaggcggctggccgggttggtccatggcgccagatcaccgatgcccagcagcagcacggtgtagcccaccagcagcgtgaccagcacgccagcctgcacgcgcggccgcgcatacaccgccagaacacccaccgacgctgcgcataccgcaatccgctgcagcacgccccagatgcggaagtgatgggtatgcagcgcccaccagatcaacaggtgcagcaacgcgccggcgagcaggatgcgcagtgcacgctccagcaccccgcgcgccaatgctggccgtgcagcggcatccagcgcgcgcggtgccacgctgaaggccatcgacacacccaccaggaacaggaagaacgggaacaccaggtcggtgggcgtgcagccatgccattccgagtgacgcagcggcgcgaacaccgcactccagtcgcccggattgttgaccagcagcatcgccgccacggtgatgccgcgcagggcatcgatcgagcccagacggcgtggcggcatactgttcatcaggcggcctcgtactgtccggcaatccaggtaccacggacctgcagggcgtcgtccagcagcaccaggtcggcctggtagccctcggcgatgtggccaaggcggtcgtcgacgttgaggaactgcgccggataggtcgacgccatgcgcgccgcttcggccagcggttggccgagcagctgcacggtattgcgcacggcggtggccatgtccagcgccgagccggccaacgaaccggcggcattgcgcaccacgccatcgatggcggtgatggtttcgccatacagcacgtagctgggatcgtcggctccaaccggcggcatcgcatcggtcaccagcagcaggcgaccgcgcggcttggccgccaacgccacgcgaaggctggccgggtgcacatgcacgccatcgacgatgatgccgatccagctgtcgcggtcttccagcgcagcgcccaccgcgccgggctcgcggccctgcaacggcgacatcgcgttgtacagatgggtgaagccgcgcacgccggcatccaggccggcgcggatctcttcgtaggtgcctgcagtgtgcccagcagcgacgatcacgccacgctcgaccagcgcacggatggtctccagcggcacgcgctccggcgccagcgtcagcagggtcacgccgttatccagcgatgcggccagcgcaatctccgcttcgtccggcacgcggaacttgctggcatcgtgcgtgcccttgcgcgccggcgcgatgtacggcccctccagatggatgccgatcacgcccggcacgccctgcgtgatggcctcgcgcattgcaccgatggcttcgcgcatcaccgccacgtcatcgctgatcagcgtcggcagcatcgcggtggtaccgaagcggcggtgcgcctgcgcgatggtgcgcagtgccaccacgtccggcgtgttgttgaacagcgcgccgccgccgccattgacctgcacatcgatgaagccgggcagcagccagccgccccccaggtccacctgctcggccgcgtggcccagctggggtgctgcgtcgggcagcagcgcgctgatgcgaccgtcctcgatcaccaccgccaggtcgtcgcggaactcatcgctggccaggatgcgggcattgcgcagcaccgtcaccatcacaccgtctccgtaaccttgttcagatgcggcggcaggtccgggttgaagccacggcgcagcgccagcgcattgatggcgcgatagaagctctgcacggtcaatagcggtgcgcacagcggatgcggcgcggcagccaccggcaggttgccgccggcaccggccatccacacctgcgcaccacgtgcggtgaattcatcgaccaccgcacgggtaccggcgccggtctcgtccggctgggcgaaggccagcacagggaagccacggccgaccagcgccatcgggccgtgcttcacttcagccgagctgtaggcttcggcgtgcaggctgcaggtttccttgaacttcagcgccgcttcctgcgccgcacccaggcccaggccgcggccgagcacgaacaggttggtggcctcgaccaggccctcggtcaccgcgctccagtcgcactgccaggcttcacgcatcgcgtccggcagcaggtccagcgccgcacgcaggctgctgtcctgcttccagtacgcggccagctgcagcaatgcggccagcgaggccaggtagctcttggtcgctgcaacgctcttctcggggccggcatgcagcgggatgaccgtgtcggccagctgcgccagcggtgaatcctcgacgttgaccagcgcgatcacgcgcgcgccggcggccttggccgcctcggcgttgcgcagcaggtccgggctcttgcccgactgcgagatgacgatgaacagtgcgccgcgcagctgcaagggtgcggcgtagaccgagcccaccgatggcgaggccgacgcgaccaccagccccagctgggtttccagcaggtacttgccataggtggcggcgtggtcggagctgccgcgtgcacaggtgaccacgaacggcggcggcgcggcacgcaggctggcggccagggtttccagggtggcgtggttgcgcgagaactggcgcgcgaccacgtcggccgcttcagcggcctcggcgaacatcagggtagcggtggggtctgacagcgacatggcaggctcaggcaggatcggaaggaagggggcgtgcgccggccgggcgcatcggcgcggtcgatccgcgcaccaccagctgcggcacgaagccctggttgtgcagcggcgccggcgcatcgtcgtaggcgtcgctgcgcagctgtgcgatcagcaggcgcgcggcatggcgggcgatgtcctcggtggcctgcttggcggtggtcagcggcggccacgactggcgcgagaacgggctgtcctcgaaaccggcaatggacaggtcgtagggcacgttcatgccggccgacttggcagcggccagcacgccggcagcgatttcgtcgttggaaccgaagatggcggtaggcggttcgcgcagcgccagcaggcggcgcgcgccacggaaaccgtcgtcgaaggtgtagtcgccctgcaccaccaggtgcttgtccacggtcatgccgtagtccttcaacgcggcctcataaccggcatagcgttcgcccgaggagcggtgcgagctgccgccccagaggaagccgatgcgctggtgccccagctggatcaggtgttcggtgatctcgtaggcggcctcgcggtcgtcgacgaacacgcaggcaccgtcggccggatcttcggtggccgcaacgatgcgcaccagcttgatgccacgcgcggtcagcgcctggatcaggtcgcggcgctcggacatcggtgcggtcagcaccagcccggccaggcgcgaacgctgcacccagtcagccagttcatcggccagcagcggcgaactggaatcgcagggatggatctgcaggccgaacccggtctcgcggcaggcggcgagcacgccgttctgcacgccgatgatgtggtacgggttcgggttgtcgtagaccagcccgatcacgaaggtggtgccgctgcgcaggttgcgcgcggacggatcgggctcgtagtccagctcggcgatggcacgcagcacccgcgcgcgggtggcctgcatcaccgagggctcgttgttgatcacccgcgagaccgtcttcagcgagaccttggccttttcggcaacgtccttgatggtcgctctgcgcatcggtttttcctggggttggctgccgtccatcatcgccgatcagctccggtcctgcggcaggcccacgcggtggcccaccaccgaatagaacaggatgtacaggtagcagggcaccatcagcagcacgaaggtcagctggaaatcgatgtgctgcttgagcagggcgaacagctgcggaatgatcgcgccaccggcgatgcccatcaccagcagggccgaaccggtttcggtgaagcgccccaggccgcggatggccagcgggaagatggccggccacatcatggcgttggcaaagcccagcagggccacgaaggccaccgacacatagccgtgcgttgcccacgcgcccaggcagaacaccacgcccagcaccgccgaaatggtcaggtagcgcgactgcgacaccacccgcggaatcaccagcaggccgaccacgtaaccgaccagcatcgcgcccagggtgaaggcggtgaacatcttggtctcgtccagcggcaggttgaagccatggccgtaggtgccgatggcatcaccggccatcacttccacgcccacgtacacgaacaggcacagcacgcccagccacaggtgcgggaactggaagatgctgcggcgctcgaccgcaccggcggccaccggcgtagcgttggcttcggacgatttgatttccggcagcggcgagaacaggatcgccaccgccaacaccaccagcagcgccgccatggccaggtacggggcatggatcttggcggcgaactggttcagcagcacggctttggtcgcggcatcggccgcctgcacctgcacgtccagatcgccaatgccatgcagcaccaccgtgccgatcaggatcggcgccaggatgccggcgatcttgttgcagatgcccatcaacgcgatgcgccgcgccgccgtttcgatcggcccaaggatcgagatgtacgggttgatggccgtctgcagcagggccaggccgctgccaatcacgaacaggccgcccagtgcgccggggtaccagcgctgggtggcgaattcgccgaacagtgccgcgccaccggccatcaccagcaggctcaggctcaggcccttcttcatgccggtacggcgcaggatccacgacgagggcagcgccaggaagaagtaggacaggtagaacaccatcagcaccaggaaggcgccgacctcactgagctcgaaggcgagcttgacgaaggtgatcaacgggccgttgagccaggtgaagaagccgatcaggaagaacaacacgccgacgatggcgatggaggtggccacgttcgggcgcgcgcttgcagcggggacggcggacatcaggagggctcctgcggcgacagccgcagaacgcggcgtcggagagtggctgggaacaacgttgtcacattctttcggtggacaacggcggtttgtcaacttccatgcacgccccttcaacctcgtgctgcactgcgcaagtcgattgcggtgctccgcgctgaatgcgcgccagccctagagccccatgcagcaacggttcccacgtgaaacccgcactcacgccatgtaaacgtttactgcctgtcgcattcgttgcggcgcagcaacgaaagtgtcacgaactcgttgacatcgttgtcagcgcggttacagactccgccccaatcgctgcccccgatcccggggccagccccacctgcagcaggagcccgcgtgaccgccagccaccccgccccgtcgcatgtcctgtcccgcgtcgcgccctcgttcctggccgcggacgtcggtggcacccatgtgcgcgtggcccgggtccaggccagcggtgacaccgcccatccggtgcaggtgctggaataccgcaagtaccgcaacgccgaccatgccggcctcagcgcgatcctgtccgacttcctcggcgaaggcccgcggcccactcattgtgtggtcgccagcgccggctacgcccgcgaggacggcacggtgatcaccgccaacctgccgtggccgctgtcggcacgccaggtggaggccgatgtcggcctgcagcgggtctacatcgtcaatgacttcgaagcggtggcctatgccgccgcgcaggtggacgccagtggcgtgctgcacctgtgcgggccggacaccgctgcgcgtggcccgaccctggtggtcggtcccggcaccggcctcggcgccgcgctgtggatccccactgcgcacggcccggtggtgctgccgacggaagccggccagccgaccctggccgccagcaccgaactggaaatggccatcgtccgccacatgcagcgcgaccgcgcgcacgtgtcgatcgagcatgcgatctccggcccgggcctgatgaacctgtaccgcgcggtgtgcgcgctgcagaggcaggcaccgacgctggccagccccgatgcggtcaccgccgccgccatggccgataccgatgcacacgcgcgccaggcgctggatgtgttctgcggcctgctcggcagcaccatcggcgacatggccctgttctatggtgcccacggtggcgtctacctggccggcggcatcctgccgcagatccgcgaatacctgcacgccagcaccttcgtcgaacgctacctgcagaaggggccgatgggcgaagcactggcacgcatcccggtgaaggtcgtcgaacacggccagctgggcgtggtcggcgctgccagctggtacctgcagcagcagtcggccgcctgacaccgcaacaggcttcaacgcaatcgcagcacgcagtacgtggcacgccaacgcacgggacttcgccgccgccccgcgcatgtcatcgcaaccgttatcgaacaccgccgccggcatccaatcgagtgatgaggagagacatcatgaatacccgcaagaccctgctttcggccgccatcgtcagctgcatcgccttcagtgcgcacgcgcagcaggctgccccgaccgccaccgacctggacaccgtgaccgttaccggcatccgtggttcgatggaaaaatcgctggacaccaagcgcgaagccaatgcgcgcgtggaagtggtcaccgccgaggacgtgggcaagctgccggcgcacaacgtcgccgacaccctgcagcgcctgccgggcgtcaacatcagctcgtccagcgccgatgaaggcggtttcgacgaagccgaccgtgtcagcctgcgcggcaccagcccgagcctgacccagaccctgatcaacggccacaccgtcggttcggccgactggttcgtgctcagccagggcaacaacgtcggccgcagcgtcagctactcgctgctgccgtccgaactggtcagctcggtggaagtgaacaagtcctcgcaggccaagctgcaggacggcggcaccaccggtaccgtcaacatcatcacccgcaagccactggaattctccaagccgttcaccgcggaaggctcgatcggcctggtgcgctcggaccaggccaagtcgaacgacccgcaatattcggcgctgttcaactacaagaacgacgaaggcaccttcggcgtgatggtgcagggcttcagccagaagcgcgaactgcgccgtgaagcgcaggaaattccgggcggcttcttcaagatcggcgcggatgatccggtcgccagcaccaatccggacctgatcggcgtcaacgttccgggcctgctgggttcgacccttttcgaacagacccgcgagcgcaagggcggcctggtctcgctgcagttcaagccgagcgacagcctcaccctcggcctcaatggtttcagctccgagctgaaggcgaacaactacaaccgcaacttcatgatgttcggcaacagcttcgccaagtcgcaggcgccggatccgggctatgtggtcaaggacggcgtgctgaccaacgccaactacaagggcgtgcccggcaccgactatgcggtgtacgacatgatctaccgcgagtcgaaggccaagtcgagctatgtcaccttcgatgccgactggcagatcagcgacagcctgaccgccaagttccaggccggcagcaccaagggtaccggcgagacgccgcgccagtacatcgccgaggtcaccctggccaacggcggcggcgccagctgggctacccacggcaatggctcgccgatcgactggaacgtcggcggcgacatctcgcccaacggcgtgaccagcttcggcacctggggcaaccagcaggtcaccgctgaagacaaggagaagtgggccacgctcgacttcaaccagtacttcaacgatggcggcgtgctgagctcgatcgacttcggcctgcgtttcgccgaccacaagcgcgaagcgctgtcgccggaaggtgcaaccccgggtgacatctggagcgcgctgaagaacggtgcgacggccaactatcccagcggctttgccggtgacatcggcggcaccttcccgcgcaacctctggtacttcaccccgggcgcgctgaaggacgcggtgaccaacaactccacctggctggccggcaatgatggcccgaccggtcgccacaactatggcgccgagtggaaggtgaaggaaaagaacttcgccggctacgtgcaggccaacttccgcggcgactggtggagcggcaacgtcggcctgcgctacgtcaacatcaagcaggacatcgacacctacaacgccgtcagcaaggccgccgatgccgatgtcagcagcctgttcggcatgtgggagcgcctggccttccagaacaagcgcaaccgcgtattgcccagcgccaacatcaagttcgacctggacgactcgctggtgctgcgcgtcgccgcctcgcagacccagaccctgccggactactcggcactgggtgcctcctcgtacggttcggacctgaaccgcaccggcggcggtggcaatccgaacctcaagccgaccctgtcgaccaacctggacgccaacctggagtggtacttcatgccgcgcggcctgctgtcggtgggcgcgtaccacatgaacctgaaggactacatcgccttcgacgtggtctcgcgccagctgtacagcgaactgaccaaccagcttgagacctaccagatctccaccccgatcaatgcggacggcaaggtcaccggcgtggaagtggcctacgaacagccgatcggcgagtacttcggcgtcaatgccaattacacctacgccaacggcaccacctcgcacacctggtcggacggctcgcacaacctgctgggcacctcgaagaacacctacaacgtgggtgcctacttcgagaacgagcgctttggcgcccgcgtcagctatacccgccgttcctcgttcctgatcagcctgtcgggcaccaatccgtactaccaggatgacttcggcacgctgtcggcgtcgctgagctacaaggccaccgactggctgagcatcaccctggatggcctgaacctcaacaacccgacctacaagtactaccagaccgcggccatcccgacctcgttctacagcaacggtcgccagtactacctcaacttccgcttcaagtactgatccagcggcggcaacatcgccgagtcgtgcacgcacgccgggcctgggtcattccgggcccggcgtttttcatgtatagcgttcatcgcaccgttccaaggagtcgtaccgatggtcaagccttcccgcgcccggatgcgcagcgcagtgctgctgggcagcctgctcgccctgttgccggcactgccggcacttgccgccgaccccatgccggccgctgaggcacccggcccgcagctgcgtgccggcagcctgatgctgattcccgcccccagcaatgtgcagcctggccagggcagcggcatcaccgtgcgcgccgataccgtgctgcaggccgaaggcgaggccgcacagcgcgtcgccagccagttcgccgacctgctggcgcgcagtggcggcccgcgcctggggctggccaagggcaaggcggcggccaggaccggtggcatccgcttccagatcgtgcccaccttccgcgacagcggcgagggctacacgctggaaagcaccgcacagggcgtagtggtacaggccggtaacgaaaccggcctgttctatggcgcaaccaccctcgcccagctcgccaccggcggcagcaacggcgtgctgccagcggtgcagatccaggacgcgccacgcttcagctggcgcggtttcatgctcgattcggcgcggcatttccagagcctggacgagatcaagcgcgtgctcgacgcaatggccgcgcacaagctcaacaccttccattggcacctgaccgatgaccagggttggcgcatggagatcaagcgctatccgaagctgaccggagtgggcagctgccgcctgccggccggcgacggtggcatcgatccggtcactggcaaggagcatccgtattgcggcttctacacgcaggaccagatccgcgaagtgattgcctatgccgcgaagctgcatatccaggtgattccggaaatcgatgtgccggggcacgcgaccgcagcgattgccgcatacccggaactgggttcgatcaataccccgctgaagccgatcagcgaatggggcgtgttcccgaacctgttcaacgtggaagacagtactgtcaccttcctcgagaacgtactggaggaagtgatcgaactgttcccggccaagtacgtgcacgtcggcggcgacgaggcggtcaaggaccagtgggaagcctccaggcaggtccagcagcgcatgcgtgcgctgggcatcaaggatgaaatggccatgcagagccacatcatcaagcgcctggagaccttcctggaggagcacgaccggcgcctgatcggctgggatgaaatccttgaaggcgggctgccgccgcaggccacggtgatgtcctggcagggcaccgaaggtggcctggccgcggccagtgctggccatgacgtggtcatgtcgcccgtgggctacctctatctggattacctgcagacggcctcgccgaacgaaccgccgggccgcccggcccaggtcaacctcggcaagctgtacaacttcgagcccgtgccggccgagctggccgctgacaagcgcgggcacatcctcggcctgcaggccaacatgttcaccgaacatacgcgcacctatgcgcgcctgcagcacaacctgttcccgcgcctggccgcggtggccgagaccggctggagcacgccggaacatcgcgacttccgcgatttcctcgcgcgcctgcccgcgcagctgcaacgctaccgcgcctggggcctggcctacgcgcagaccccgttcgaagtgggcgtggactacaccgacaaccgcgccgccaacacggtgaccgtgtcgctggccaacccgctgggctatgaagtgcgctacagcaccgatggccagccggtgacggcgcagtcgccgctgtaccggcagccgctgaccagtacgctgccgaccacggtgcaggccgccgcgttctaccagggccagatgctggcggcgaagccgacggtcgcggacttcagtgcgcaatcgctgctcagccgccgcagtgacgaactgctcagctgcgtaggcaagaaggggctggtgctgcgcctggaagacgatggcccgcgcgagggaaaccgcgcagtgttcaacgtggacatcttccagccatgctggcgctggccacaggcacagctggacggcatcggcagcgtggaagtccgcgcggggcgtattccgtactacttccagctggcccacgacgagcccaagcgtcgcttcgagaaggccaagcgtgcgcatggcgagatgctggtgcgtcgcggcgactgcagcggcaaggtgctggccgaagtgccgctgccggccacgccggatgccgatggcttcgtgacgctgcgtgcgacgctgccgaagggctcccagggcaccggtgacctgtgcatcaacttcaccggcgacacgcgcccggcgatgtgggtgctggatgaggtcacgctggggaagtgaccccaagcctgtcctggcgcaatcgatccacgcatggcgtggatctactgtagagccgagcccatgctcggctgcctttgggaggaagccgagcatgggctcggctctacaggaactttacccgcgccagcgcagcagcagatcgcgcagcggggtcagtgccgtagccatgccggccagcacgccgatcgtgttggccagcgcgtccatcggatcggccatgcggtcatcggtcaatgcgccctgcgcgaactcgatgccgatccccatcagcaccaggcccacgcccacccacagcagcggacgtccgcgccggaacagctgtaccgcgctgccagccaggatgaaataggcgaggaagtgctcacccttgtcgccgttttccggcaacggaatcggtggcggtgggatcaggcagaccacgatcaccagcaacaccgcgctgaaccacagtgcggtccacagccgcggccgccgcagcggcttgatcagcggcagcgcatcgctcacaggcgccagctcaggtcacccagctcgaaggcgggctcgaagtcgacgccgcgctgcaggccgatcgcctggaagcgctcccccatctcggtcggcagggtcagcttcttcacctggtcgcgcagctggatgcggccgacttcatcggtgcgctcctcggccagcgacagcacctggtccaggccgttgccgagcaggaagctggcctggctgcagtagcccgccagctcgaaaccgccgtgcatgccggcctcggccatcgcggtgaaatccaccgacgcggtgatgtcctgcagccccggccagcggtgcacgtcgttgtgcacgtggtggcggtagaacgcgcgtacggtgccctcatcgcggtcgtgctggtagaactcgccacggttgtaaccgtagtcgatgaacagcatcgcaccgcgctgcaggccgcccgccaccgcctgcaaccagtacggcagctgcggcagcacctcggaacggtagccctcggcgaaggggcgctccaggtagcgctcgatgtggcgcaccgcaccgttgagcaggatgtcggccggctgcgcaccacggatgaagttgccttcggcgtccagttccacggtttcctcgtaaacctcgccatcccggatcaggaagcgcggcgtcggcagcgcgtcgatcacttcgttggcaaacaccacgccctcccagtcctcttcgaacgggcgatcgacccagtccacgcgtgcggccagctcggccggcaggttctgctgcaggcgctgttgctggcgctcgcgcaggtcggcgctgggttcgaggatggcgtagcgcgacggcagcgcgtccagctcggccaggcgcagcagcaccgcttcggcgaaggcgccggtaccaccgcccagttccagcatccgcgcctgcgtacccagctgggcgaacaccggcgccagcgcgttggccacgctgccggcgaacaggctgccgagctcgggcgcggtggtgaagtcgccactgccgccgaatttgctggcgccggcgctgtaatagccccagccgggggtgtacaggcacagctccatgaagcgggagaacggcattgccccgccctgcgcaaggatttcggcgcgcagggcagcggccagctggtcgctgtgggccagggcatcggcttcgggcagggggaaggtgggctgcatggcgtcttcgaatgcggtgacaatggtgcacaggatagccgagccttggaggaccctcgatgagcgatacccaccccgtggtcctgatcaccggcagcgcgcgccggatcggtgcggccatcgcccgccagttccacgcctgtggctggtcggtggtgctgcacgccaacacctccagcgccgagctgcagcaggctgcgttcgatttcgacaacgtgcgcccgggcagcgtgctggccctgcaggccgacctgcgtgacgccgacgccctggccgatctggtcgaacaggccgtcacccacttcggccgcctggacgcgctggtcaacaacgcctccaacttcttccccaccccgctcggccaggtcaccgccgaggcgatggacgcgctgtatgcggtcaatgcacgcgcgccgctgctgctgtcacaggcggcggcgccctacctgcgccgccagcagggctgcatcgtcaacctcaccgacctgcacggcaccgacccgatgcgtgaccacatcgcctacaccatggccaaggccgcgctggagatggcaacgcgcgcgctggcgctggagctggcgccgaaggtgcgggtcaatgcagtagcgccgggtgcgatcctgtggccggaacagggcaaggatgatttcgcccgcgaggcgctgctggcacgcacgcctttggcgcggatcggcaccgtcgaggagatcgccgaggcggtgtactggctggtggccgaggccagcttcgtcaccggccacaccctgcgcgtggatggcgggcgtacggtcagctgaaaggttgccggggtccacaacggggtcagatcccttttcccggcgggaaaagggatctgaccccgtcactccagatccaccacctcgaatgcctcgccaaactgcgggtgcgcgcgccacagcgtggccaggtcctgcccgctgaccgggtcgatgaagcccggcgcgatgtcggccagcggcttcagcacgaacgcgtgcttcagctccggccgcgggatgcgcaggtgccccgggccttccagcaccaggtcgccatagaacaccacgtcgatgtccagggtccggtcggagaagcgcggcccgctgcggtcgcgaccgtgcgcgtcttccagcgcgtgcagccagtcgtccagctcctgcagcggcagatcggtctcgatcgccaccgcattgttgaggaaggccgggccatcgaagccgaccgcggcggtacggtaggccggcgatacctgcagcgcgccgaagcgctcgcgcagggccgccaccgcggcgtggaggtagcggcggggctggacattgctgcccaggctcaggagcacggtcgtcatgcggttcaggtggcagcaatgggggcgtggacatgccgtcgtcacggcggcctgcctacaatccgggatgcacatgatagggcaccgacatgacctattgcgttggaatcgaggtggacgagggcctggtcttcgctgccgacacccggaccaatgcctcgctggacgatgtgcgcgtgcaccgcaagctgcacgtgttcgagtatcccggccaggcagcctacgtgctgatggcggctggcaacctggccaccacccagctgctggtgtcgcgcctggggcgcgatgccgacgaacggcgcgcgcccaacctgcgcgacatgacccacctgttcgaagccgccgagtacgtcggccagctgctggtggacagccaggtgcacagcaaccacagcgaacatggccacgatggggtcaatacccaggccacgctgatcttcggcgggcagatcgccggcgagcgccccgggctgtacatgatctatccgctcggcaacgccatcgccgcctcgccggagacgccctacctgcagatcggtgaatccaagtacggcaagccgatcctcgaccgcatcctcagcccggccacgcgcctggaggatgccgcacgcacggcgatcgtctcgttggactccaccatccgttccaacctgtcggtgggcctgccgatcgacctggcgctgctgcgcgacggcgaactgcgcatcggccagcagctgcggctgggtgcggattccacgctgtatgcggacatccaccagaactggtcgcggcggctggaacaggcagtggacgccctgccgcgtttcccctgggaaaccaacggacggtagtgccggccgctggccggcaaccgcgttgatcccaccacacaggaatgccggccagcggccggcactaccgggcatcagcccagcgcttcggccaccgcgcggaagaccagctgcatatctgcagcggctggaacaggcagtggacgccctgccacgcttcccctgggaacctgccgaacggtagtgccggccgctggccggcaaccgcgttgatcccaccacacagggatgccggccagcggccggcactaccgggcatcagcccagcgcttcggccaccgcgcggaagaccagctgcatatctgcagcggctggaacaggcagtggacgccctgccgcgcttcccctgggaaaccaacggacggtagtgccggccgctggccggcaaccgcgttgatcccaccacacagggatgccggccagcggccgccactaccgcgacatcagcccagcgcttcggacaccgcgcggaacacctgctgcatctgcagcggcttgcgcagcacgtgcacctgcacgccagcgggaaatgcatcggccgccacctccaccgctgcgtcttccagcaccagcgccgggccgcgatagcccagcgtggccatctcgcccagcagctggctggccggcaacaacttcgagccggcgtcggcaatcaccagcgccggcattgcctcctgctgcatccagcgcagcgccgccgggccatcggaggccagctgcagctgatatccctggcttgacagcgcattgccgagcaacgacaggcgcgtggcctcgccatcgaccaccaggatcgactggccactgcccagggccaccagctgctcgatcggctcactaccgtcgctggcttcgtgcatcggcaagtgcagttcgaagcaggtgccctgccccggctggctgctgacatggatgctgccgccggcaccttcgacgatgcgcttgcaggaaatcaggcccaggccggtgccgtcggccttggtggtgaagaacggattgaacaggtgcgacagcgtgtctgcatccatgccgatgccttcatcggccacgcagatccgcatccagtccacgccatcgcgctggccggcatggctggcgatcaggctcaggcgaccgccgttgggcatcgcctggatcgcgttgagcgccaggttcaacatcacctgctgcagctcggtgtagttggcatcgaccaccaggccttcgtcctgcacctgcagttccaggcgcacggcatcgggcacgttgctgcgcaacagcagtgcaaccgcatcgaacaggccatcgatctcgatgcgctcgctcggcttgcgcgaaccgcgcacgaacgacagcatcgattcggccatctcatggccacggcgaccgcactcggcgataacatcggccaggtggtgcagctgcggatcctcggtgcgcgccttcagcaggtccggcatgatcagcaatggctgcaggatgttgcgcaggtcatggctgaggccggcagcaagcagcgacaggctttccaggcgctgcgcgcgcatcagctcggtttccacccgtgcacgctccaccgcgctgcgtgcatcgcggatcgcacgcgccaccgccgacggcaggcgcgccggcagatgcttgatgatgtagtcattggcgcccttctgcagcgccgccaccgcgttctcctcacccatcgtgccggagacgaagatgaagggcacgtccggcgaggtctcgcgcacgatgcgcagcgcgtcatcaccggagaaccccggcatgctcaggtcggacagcacgatgtccggctggaacgcagccagtgcctggcgcagttccgcctcgctctcgacacgctcgaagcgggcgtccaggcccgcgtcgagcatctgttcggacatcagctcggcatcctctggtgagtcttccaccagcaggatgcgcagcgcccccagggcgggaccggtcaggggcatgggctcactcgagttccggtgcctggttgatcaacgcccagaacttgcccagggtctgcaccgcgccgaagaactggtccacgtccaccggcttgaccacgtaggcgttcacgcccatgtcccagctgcgggccagatcgctttcctcgcgcgaggacgacaggatcaccaccggcaggcgcttgagttcttcgtgctcgcggatctgccgaagcacttcgaggccatccatgcgcggcatcttgatgtccagcagcagcaccgccggcaggccttcctcgcgattggcgaaggcgccgcggcgcagcaggtagtccatcacttccacgccgtcttcgacgtgcacgatgggattggccagacgcgcctcttccagggcatcgatcgccatttcggcatccgccgggctgtcttcggcgagaagaatggtgcgcagagtggtcatgcagaaggcccttgtttgtccgcgtcgatcgcgggaggcaggtagaagtggaaggtggcgccgacgtccggttcggcctcggcccagatacggccgccatggcgggtcagcacgcggcgcacgctggccaggccgatgccggtacccgggtagtcgctggccttgtgcaggcgctggaatacaccaaacagcttgccggcgtaggccatgtcaaagcctgcaccattgtcgctgaccgtgaactgatggccgccatcgggctgcggctggtagtccacgcggatcctcgccggctcgcggttgcccgagtacttcaccgcgttgccgagcaggttcagccagacctggcggatcatgttctcgtcgcccaccacgatcggcagcggcgcgatgctccactccacgtggtgcgcatggccgctgttctcggcctcggcctgcaggttggcatcgagcatggcgcgggtatcggccaccagcgactgcatgtccaccgcctgctggcgcatcgccgcgcggcccagccgcgaatagaccagcaggtcgtcgatcagcgccgccatgcgccgggccgaactggagatcacctccaggtaatgccggctcttgtcatcggcggcgtcgccgaggtggcgcgacagcttgtcggagaatccggccacgtggcgaagcggcgcacgcaggtcatgcgaaaccgagtagctgaaggcttccagctcgcggttgacctcggacacctgcgcgaccttgccctccagctggcggttcagctcttccacgcgcagctgcactgcgcgctgcatggtgacgtcgctgatggtcagcagcaccacttcgtcatcggtgtcgggcagcggcatgcgccgtgcgttgagcagcatgtagcgcaccatgccatcggcggtacgctgctcatgctcgaagtcccagagttcgcggccacgcgacagcacatcggccaggcgctggcgcaccaccggatcccgccaggcgccgtcgccgatgttttccagcagcaggccatcggcgcgctcgtcctgcaggtcatacagttcggcgaacgccgggttgtgcagctgcacgcgcaggtcgcggtcgagcagcacgatcggttcgcgcacggtctgcagcaccgacgccgcgcgtgcggccgagcgcagcgattgccgttccgcatgcaggcggcggccgatctgccgctgcagcagccacagcaccaggccgagcagggccagctggatcgccagcgaactccacgacaccagttcggtctgcttgcgctggcgcgcggcctgctgggcgcgcagtgccagcagattctgctcgctggcctgcagctcctccaccaggccacggatcggataacgcgtgctcaggtcctgcaccaactcacgctggtcggagttcggttcggaccgggccagctcgcgggcaagcgccatgcggccttcgagcatcgattcgatccgaccaatgcggatcagctgatcgggattgtcacgcgtcatccggcccagttcggccaggcgcccggggatatcgttggccttggccatccgctcgcgcaggccgggcgcatccacgcccttggacagggtcagcgcggcggattcgacgtcgcgcacatcggcctgcagctgttgcagcgccacaccaacggactgggtgtggttgacccaggccatcgcctcttcgctgtcctgctgcagtttgcgcagggtcaaccacggcaccacgatgatcgcggcagccgccagcgccagggccggcaaccgccagcggtcccagatgtcgtcactgaaaaccagcgccatagttcctcgtcagcacggccgcggagcgggacccgggacgagcccggctgcggcggaaccggcaatatagcgcaggcaatcacaactctggagtccaaagcgcggcaggctgaacgggcccccgcagccggccccatacgcgagtgggcgcccccttcggggcgcccaccctgttcaacggtcggtggatcctcagcgcttggcagcggcgctgaccttaagcgcggcggcatcgacgcgggtcacgcccttgatgcccttggcggtgttgaccgccttgtccttctccgcctgcgtagcgacggcaccgctcaggctgaccacgccgttcacggtttccaccttgatctcggtgcccggaacgttgctgctggccagcagatcggccttcaccttggtggtgatccaggtatcggtcaccggctcattggagtcgtgacgatcagcatgggtcgtcggatgggtgctggtcggcgggctcttcgcggccgggtccttggcgaatgcggccgaggaggacagcgccaggcccagggtcagggcggaagcaatcagcgtgcgggtggtattgctcatcgtgtcgtactccttcggaatgtgctgccagtctggacaacccaccgtagagcaggcgtggcgttgcggtcatgccgccgtgaatcgaaacgtttccaatggcaaccgttcagttttggactgccagcacccgtcgtttaccctgcccttcccactgccggagccctgccatgcgccccgacctgcaactggccctgatcggctacggcctcgccggccgcgtcttccatgcaccgctgatccagcacacccgcgggctggcgctgcacagcatcgtcagttcacaacgcgacaccctgctgcggacgttcagcgatgtgcacgtgcgtgccacgccgcagcaggtattcgatgatccggccgtggatgccgtagtgatcgccacgccgaacgaacagcacgcgccactggccatcgcggcgctggcggcaggcaagcatgtgctggtcgacaagccgttcgcgctggatgtggccgaagcggaaacggtgctggctgcggcacgcgatgccgggcgcatcgccaccgtgttccagaaccggcgtttcgatgccgacttcctcaccctgcagtcgctgctggccgaaggcagcttgggcgatgtggccgagtgccacgcgcacttcgaccgttatcgtccgcaggtgcgcgaccgctggcgcgaacaggacgggcccggcagtggcctgtggtacgacctcggtccgcacctgctggaccagatgctggtgctgttcggctggcccgaggcaatcgatgccgacctggccgtgcagcgcgaaggtggcggcggcatcgattacttccacgcaatactgcactacccacggcatcgggcgatcgtccacgccggttccctggtggcagcgcagacgccgcacttcagtgtgcatggcagcgccgccagctggatcaagcacggcctggacgtgcaggaggcgcagctgcgccgcggcgtggcgccgggtgcgccaggctggggcctcgatccgcggcatggcgagctggtgcgctgcgataccgaagacaacgtgcaacgcagcaccgtcgacaacctgcccggcgactatcgccggttgtatgcgcagttcgcggcggcgatgcacggcgagggcgaagccacggtcaggccggtgcaggcgctgcagctgatgcggttgctgcaggccggcatggacagcgcgcgcgaagggcggcggatcgcgttggggtgatcggcagggctgcgccctgcacccgcacaagcggtagtgccggccgctggccggcaacctcaacagcaacggcaaaaaacggcaatccgtgagatggcaggatgggtccggttgcgggagccggacccaccccgccttcgacagagtcccgcgcccgacggtaggtgtcgaccttggtcgacacatcgacgtggaagccatcggagacggcttttgcagagtcgagccatgctcgactgcctgcatggggtcagagccctttcctgcggaaagggatccgaccccggcttcgtgcttacgacttcttgatggcgtggccgccgaattcattgcgcatcgccgacagcaggcggtcggtgaacgaattcgattcgcgcgagcgcaggcgttccagcagcgacagcgtgatcaccggcgccggcacatccagcgcgatggcttcggccacggtccagcggccttcgccggaatcctccacgtacggggcaatgccatccagcgaaggattgcgcttgagggcttccgtgctcaggtccagcagccacgaacgcaccacgctgccgtggcgccacacctcggccacctgcgccaggtccagttccatctcctgcttgcgctccatcagcgcgaagccttcggcataggcctgcatcattccgtactcgatgccgttgtggaccatcttggtgaagtggccggcaccggacgggccgacgcgcccccagccacgatcttcggccggggccagcgtgcgcagcaacggtgcgatctgctccaccaccgacgcttcgccaccgaccatcaggctgtagccttcctgcaggccccacacgccaccgctggtgccgcagtcgacgtagcccagatcatcctcggccagcgccttggcgcggcggatcgagtcctggtagttggagttgccgccgtcgatgacgatgtcaccctcggccaggtgcggggtcagctggcccagcgtctggtcgacggtttcgccggccggtaccatcagccacaccacgcgcggcaccggcagcgcggccacggcggcggccagcgaatcaaccacctccaggccggcctcggcggcgcgctggcgggcgccttcgcccgggtcgtagccgaccacgcggtggccgccgcgatgcaggcgctgggccatgttggcgcccatgcggccgaggccgatcattgcaatatccattgtttcaccttcagttggggtctagggtcaggctgcctggcctgccggtagccgcgcagtggcgcagctgcgcctcgcgccaacgccggtagagcgtggtatgcagattgtgcaccgccaggtcgattgaaaacggggttcgcgggttgcgatcgagcaggcgggcgacgtggtagccgatgggacgtataccgcgtggatgcacatagatcacgaactgctggtagaacggatcgtccagcagctggtccatgcgcgcgagcgtgtcgtggtagcgcggcgccagccgtgcgcgcaactgcggatcgcgctcgaacagcaggcgctcgaagtagcgctggccgatgcgcgggatgtcctgcgccagtttccagagttcggcattgcgctggtcgtaccaggccaggccgccgtgctgcgccagggcctgcgcagcgccctcgcccacagtgacgaccacgaagttctcggcctggttgctcaggtcatccagcgtaccgttgtcgtacacatgttcgatgaagccgggcacacccacgaacgcctgccgccccatcgccgaggtgcgcaccgccttgccgtcggcgaagaactcgcccgcgtgcgcgccaagcaggatgctgtcggtggcgtgcagcgcgaggaaggtgccgatcgacagttcatccgctgcgaactccgtatcgaacgcagcatcgccatacagctcgcgctgggtggccagctgcgcgacctggcggccgacaccgcactcggcgcgcacggcaccgctgtagaacgcctgcagcgcatggctgttgcccgcactgggcacgaagccacggccgaaactgcgcgtacgctgccagccctgtgccggcgcgccgcgcagaccaaagccgatccagcccagttgcgggccggagaaacggaacgtggcattgccctgcaatgccgaggtcgcgcgccgcgtggccgcccccagctcgaaggcataggcgcagaccgtagcagggtcttccagcagctgctgcagcagtgcctgtcgttcgcctgcaggcagatccgccggccagcgtacgcgcaggtcacccgctgcctgtgccgcggcgagcgaggaacgcgtacacaccgggcccttgtgtacctgcggtgcacgcagctcggcatcctcgaagcgccaccccaaccgctgcagcaggccctgcgtacagtccggggatggcgctgcgacgacccacgcgggcgccagcagcagggctgcaatcagccacctgccgcgcacgctcagccctggtccgtgaccgccggtgcgggtgcgggctccggtgccgctgccggcgatggcggcggcttgcccgccgcggccggcaggtactgctgcaggcgctggaagaagcgacgatagaactcggcatcggtgaccgtgctgctggccaccttcaccagcgagtcgtcgttgctgccgaagggcagcgataccgaacccagcgctcccacaccgacactggccgaggtcgggctcttcttcagcgcgtagcgatcctgcactgcgctgacgaacaccagcgtctggccgccacgcggggcgcaggagatgcgcagcaccagctgctcatggtcatcctcgcgcggctggaagttcttgttgccttccacctgtgcatcgtcggaacgggcgatggcatagccctggctgagcagcgtgcggcgcgccgcttcgcaggcttcgcccgggcgcccatcgaccgtgcgcgagaaggtatcgccggaatcgaaggactcgcgcaacacggtgctgtcggcggcacggccaccgcaggccgagaggatcagggcgctggtgagcgctacggcggcgctggaaagacgggaggcccgcatgggtactcctgcgagaacggaagcaccaagggtagtcccacccccgtgtgcggcaggtcgacataccctcccacgttgctcccggttcatgcacgaaaaaggggacggaaaaaggggacggagggaattaagtcgtttgtgccacaaacgacttaattccctccgtccccttttacgacgaggggccggcaatgccggcccctgaggtgtcacatgccgtggccggctcagtccgcccagcgccccgcgccggtggactgcggcagcacctgggccgacagcgggcggtcattggccagcagattgaccgcgtcagcgaggatcgaggccgactcgcgcagcagcgggtccggacgcttttcagcggccttctcacgggcggcatccttgacgatgtcgcgctcgttgccggtcaggccatcgtcgctgctgtcgtcggccagcgggtccagggccaggcccagttccttgcgctgcacctggcgctccttgcgctgggcgtcctggcgctcgcgctcggcacgacgggtcgcctcgttgagcgagatgtacttcttcgcggcctcggtgcggaactgctccacgtcctcgttccaccactggaattccttgtcagtggcgatgcgcgcgtcgtggcgggtctccagcttcggcagcagcggcgcgaagttgccgtactgggtgtgcggcacggcggcgatgcgggtccacggcagggcgttgtcgtaggtgctttcgccgaattcggtggcatcgacgctggccgggaaggccaggtccggcaccacacccttgtgctgggtgctgctgccgctgatgcggaagaactgggcgatggtcagcttgacctggccgaagcgctgggtctcgccgctcggccagcgatcgaggtcgacgatgttctgcacggtgcccttgccgaagctggtttcaccgatcaccaggccacggccgtagtcctggatggcaccggcgaagatctccgaggccgaggccgaaccacggttgatcagcaccgccagcgggccatcccacgccacgccctggttgcggtcgctgttgacggtaacgcggccaccggactcgcgcacctgcaccaccgggccctgttcaatgaacaggccggtcagttcgatcgcttcatccagcgagccccccccgttgttgcgcaggtccagcaccacgccatccagcttgtcgttcttgaagccggccagcagcttggcgacgtcgcgggtggccgaggcgtagtcagcggcattgcggcgacggccttcgaagtcctggtagaaggtcggcagcttgatcacgccgatcctgcgcgccggttcgccgttggcggccgggatgctcatggtctcgcccttggcggcctgttcggccaggcgcaccttctggcgggtcaggaccagcgtgtggtgcttgccgtccacgccctcggcggccgggatgaattccagcttgacctgggtatccttggcaccgcggatcttggccacgacgtcgtcgatgcgccagccgatcacatcctcgaccaggccggacttgccctggccaacgccaacgatgcggtcccccggcttcagggtgccgtccactgcggccggaccaccggcgatgatctcgcggatcaccaccatgtcgtcctgccgctgcagctgcgcaccgatgccttccagcgacagcgacatcgcctggttgaagttctcggcggtgcgcggggtgaagtagtcggtgtgcggatcaaccgcgctggtgtaggcgttcatgaagaactggaagacgtcttcgcccttcagctcgttgaccgacttctccagcgtcgcgtagcgcttgtccagcgtcttgcggatgtcgtccggcttcttgccggccagcttcaggcgcagccagtcgttcttcaccgacttgcgccacagctcatccagttcggcactgctggccgcccacggaaccttcttgcggtcgtattcgaagcgctcgtcggtggtgaagtccggctcctgcttgagcagcttgcgcgcataggccacgcgctcgccgacgcgctgcttgtagaccgcgaacacctggaacgccggctccagctcgccgccacggatggccgaagagatgttggcttcgaacggcgcgaagcgcgccacgtcggcctgggtgaagtactgcttgccgccgtccagggtctccaggtagcgcttgaacacgtccttggaggtggcctcgtccagcgcgcgcgggcggtaggcgtagcggctgtcggacaacaggccgtacaccagcttggaggtggtcacctgatcggcggtggccgccgcgggcaatgcgggcgagtcggccttggccgccagcgccagcggcgcgaccagcgccagggccatcaggaatgcgggggctttgaatttcattgacgtgctcgaaggcgccttgccaagggggagactgcagggtgttcagacaccacgacagtgccgaaagttgccgggtttgtcatccggccgcgctcggtggaaaaccagcctagccgggccggtgtagcaaattgtgaatgcatgcagagccgagcccatgctcggctggccggcagcaagcagccgagcatgggctcggctctacggcaggcagaggtgtgcggaccaacggtccgcacccgcctcaggagacgccggcgcccttggcctgcacgtcagcgtggtacgacgagcgcaccatcgggccggacgccacgtggctgaagcccagcgcgtagccgtagtcttccagcgccttgtagtcctcgggggtccagtacttcagtaccgggtggtgatgcgcggtcggctgcaggtactggccgatggtgatcatgtccacatcgtgcgcgcgcaggtcgcgcatggtggccttgatctgttcgaagtcttcgcccaggcccagcatgatgccgctcttggtcggcacgtccgggtgctgtgccttgaagttcttcagcaggttcagcgaccactggtagtccgcacccgggcgcacgttgcggtacaggtccggcacggtctcgatgttgtggttgaacacatccggcgggttctgcgccaggatctccagcgcgcgctccatgcggcccttgccacggaagtccggggtcagcacttcgatgcgggtacccggcgacttttcgcggatggcggtgatgcagtcgacgaagtgctgggcaccgccgtcacgcaggtcatcgcggtcgacgctggtcaccaccacgtacttcaggcccatgtcggccacggtctggccgaggctggccggttcgttggcatccggcggcttcgggcggccatgggccacgtcgcagaacgagcagcggcgggtgcagacctcgccgaggatcatgaaggtggcggtgccatggccgaagcattcgtggatgttcgggcagctggcttcctcgcacaccgtcaccaggcggttctcgcgcagcttggccttcaggttctgcacggcgttgcccgagggaatgcgcacgcggatccaggacggcttgcgcagcaccggcgcgtcggcgaactgcaccggcgaacggttgatcttgtcaccgcccagctgcttgaccccggcctgcaacggcgcggcggacggagagtcgccctgcacgatctgcaggggaatggaacgggcggtggtttcagtcatggcagttccggggggcggtcaggcggccgcagaaagatcgggcagttccggcgtgtgctgcagcagcaggccgaactggcgggccaggtggtccagcagcaccggcttgacggcatccagcccggaggggccgcccaagtctaccaccgaggtcacctgcaacccctgatagccacaggggttgatgcggtggaagggttccaggtccatggccacgttgaaggccaggccatggaaggtgcagccgcggcgcacgcggatgccaagcgcagcgatcttggcgccaccgacgtagacgcccggggcgccctcgcggcgttcggcgccgatgttccactcggccagggtatcgatgagggcctgctcgatgcggcacacgtagtcgcgcacaccgatgcccagccgcggcaggcgcaacagcgggtagaccacgatctggccgggcccgtgataggtcacctggccgccacggtccacgtgcagcacggggatgtcacccggcgccagcacgtgctcatccttgccggcctggcccagggtgaacaccggatcgtgctcgactacccacagttcgtcggcgtcggcgtcgctgcgctggtcggtgaagcgctgcatggcgcgccacaccggctcgtacgcctggcggccgaggtcgcggaccaccgccggacgcggcgcgcggtcttccggggcggcttcggccgggcagctgtcggctacagcgtccacttcacttccgggtggtcgcgcagcgcctggtgcgccaggtcgtactgctcgcggctcgcggccttgaacacgatgcggacggacacgtacttgccgttggacgaatgcttccagctgatgcgttcgttcaccacatcgatgccggcagccagcagcagacggggaagctcatgctccaggccgcggttggccgggcccatggcgctgagctcgaactggccggggaactggaagccgtggtcggggttgtcggacttgatttccatggccccattatcgggccgcagggcaacaaacccaagagtattcaccaacgtcaaagacagcactggcggcctgctgcgttgcaggtggcccaaaagcgcgggcggagagcccaacggcagctgactggttctttcggcccctcaatgaccggggcatcatgcgcgcggcctgcagtcgccttcacgccaggcctgcggcgcgtgcgcgggtaacgaattgtgtccgccggacaatgttgttttcggaacagacaagtgatcccaacgtgctcgttccggcgcgcgggcacgagtaccgtagcgttgcagaaaacgacagaaaaccgcccccttccccatgagcattccatccatgcgtagtgtcgcagccctcgggctggccggcctgctggcctctgccctcccctttgccgcccaggcggccgaacaatgtggcccggacgcgatgcgcgatcacccgccgcaggtcaatttccgcgtcgacaacgacctgttcggcggccgccaccaggaccagggctataccaacggtgcgctgttgaccctggtctcgcccaatctggtcgattacaccgacgacccgtgccttccacgcatggcgcgctgggtgaaccagtacctggaaggcctgcatccgggcaggttcgaacagcagaacatgatcttcagtatcggccagggcatcttcaccccgaccgatttcagccgcagggacctgatcgaggaagaccgtccttacgcgggcgtactgatcgcaaatttcggtttcaatgcgcgcagcggcgaccgcctgcagaccacccagctgacgttgggcgtagttggcccgtgggcacagggcaagcaggtgcagaatgccgtgcacgaagtgctgggcgacgagaaattcaagggctgggacaaccagctgcacaacgagccgctgttcatgctgacccatgagcgcatgcgccgctggccgggtgatgccagcatcaatgccgacggctggggttgggacgcgatcagccactacggcggctcgatcggcaacctggaaaccaaggccaacctcggcggtgaagtgcgcttcggctggaagctgccggacgacttcggcagcacgccgttgcgcccggccggtgagaacacggcaccgacccgcagcggccgtcccaatggctggtcctggcacctgttcgcgacctcggacgcggcctgggtgatccgcgacatcacgctggatggcaacacgttccgcaacagtcacagcgtggacaagcgccatgtggtggcctacggcggctatggcgtggccgtgatgtacggacgctggaagttcgccgctgcgcgttaccacagcacgcgagagttcaacggccagcgccaatcgccggtgttcggcagtttcaccatcagccgctcgctgtaggcgaggggctgagggtgaagcgggtaggtgccgaccgttggtcggcacaccggttaccgcatcgctcgctgcaagtcaggcgctgcaggtggtgccggccgctggccggctgccggcagttccggatgagttgctggggagccggccagcggccggcacgacccgcatccgggtgggctcatgcggagccggccagcggccggcacgacccgcatccggatgggctcatgcggagccggccagcggccggctctaccccccgcgtgcggggggaagcggccttccgaaacagaaaaggccggcatttgccggccttttcgttcaccacgccaaggcgtggatcattccgattcccaccacatccagaagctgtcccacaggcgcttgaagaagccggcctgctcgacggcggccacggccaccagcggtgcctcggcgatgaccttgccatccagcgtgaccttcacggtgccgatctgctggccggcagtgaacggtgcttccagggtcttgggcacgtcgatgctcggcttcaggtcgttgtagcggccgcgcggcacgctcaccagcatcggctgggccacgcccagctgtaccttgtcggtggtgcccttccagaccttgtgctcggccacggccttgcccggttcgtacaggcggtgggtctcgaagaagcggaagccccagttcagcagggccaggctgtcgtcggcacgctgcttctccgacgcaccacccagcactacggcgatcaggcgctggtcgccacgctgggccgagctcatcaggcagtagccggcttcggacgtgtggccggtcttgatgccatccacgctgccatcgcgccacagcagcaggttgcggttcggctgcttgatgttgccgacctggaattccttgatcttgttatacgcgtaggtttccgggtaatcacgcaccatcgcgcggcccagcagcgccaggtcgtaggcggtgctgtggtggccctgtgcggtcaggccgtgggcgttgacgaagtgcgagtccttcatgccgatcttggcggcgtagctgttcatcagcgacgcaaaggcctcttcgctgccggccacatgctcggccagggcgatcgcggcgtcattgccggactggatcgccatgcccttttccatgtcttccaggcgtgcggtctggttgaccgggaagccgctgtagctgccgtcggtaccggcgccaccttcgcgccaagcgcgctcgctcatcatcacctggtcatctgcacggaccttgccgttcttgacctcggcggcaaccacgtacgacgtcatcaccttggtgatgctggccggggccagctgctcgtggatgttctcgccggccagcacctggccggtggcgtagtccatcaggacccaggccttggacacgctcggggccggggccggcggggtcgcgacggtggccggggcggcagcggcggcggcaggcgccggcgtggccggggtcggcagcggcgtctgggcggaagccaggcccaccaccagggtggcggccagggcggtggcggcggaacggaaattcattggacagcaggctccaggggacggccgggaatggagggtggaacgtaacggccattgtaaggccgggggagcctgggccggcagcaccggcccgggcggatcaatccttgacgatctgcggcgaacccaggcccagaccggcgatgcggccggcaagttccgcggcactggcatggtcggtggcaggaacgcgcagacggaacagggtgcggccaccggcggcgatgtcgctgatggtcgcgccgacgatgccggcagcgttgagctggcccatcgcacggttggcgttgtcgcgactggagaagctggcgacctgcaccatcaccgcgcccaccacctgctgcgacaggctgggtgccgccggcgtggcggcgacggtgcgcacgggtgccggcgcgacggcgcgcggcgcggcgctggcgactgcaaccggcgccggtgcggtgctgcgcagcggtgcactcggcggcaggctgctgaccgccacctccggcacggtgctggccacgccctgggtggtggccggctggccgcgtgccggcatgccatcggccggcaggcgcttgaccaggcgatcgatatcgctgtcggcagtggcgcgcgcggtcgctgccgggcgtgcactggccaccgcagctgccgcttcggcggcacgacgctcgcggcgggacggcttctgcgccagcaggttgctctcgcccggctgcagcgcgcgcacttccacgttgccggtaccgcgctgggtgatgcccaggcgcacggcggcggcataactgagatcgaccacgcgaccatcgtggaacgggccgcggtcgttgacgcgcacgatcaccgactcgccattgtcgaggttggtcacgcgggcgaagctgggcagcggcagcgtcttgtgcgcggcggtgaactggtacatgtcgtagacctcgcggttggaggtcaggcggccatggaacttggcgccgtagtacgacgcggtaccgcgctcgacatagtcgtgggtatcgtcgagcaccttgtacgacttccccagcaccacgtacggcgacttgttgccgatcgccgagcgctcctcggcggtcacttccggctcgggaatgcaggccacgttgggaatgtaatccggcgtgctgtcacgcacgcccggcttgtacaggccaccggcagtgtagttgccgcgggtgctcaggtcttccttggccgccgcgtacggtgacccttccgggcagtgtgccgggcgcgagccacgcccctgcaccagcgtgccgccggacttgccaccatggccggccgtggccggcttcttcggcgcgctgctgcaggcagccagcgcgaggacgatcaagcctgggaccagccatctgatgttcatgccgggggcagctcctgtccggcgatggcctgggacaactggaacacggccatcgcgtacatcttcgagaggttgtagcgggtgatcgcgtagtagttctggaagcccagccagtactgcttgccggtgctgccttcaagcgtgatcggcgtggcggtggcgcccggctgcaccggcgcgcccggctggtagccgcgctgcgccaggtcggccatcgtccaggtcggcatccattcggtcgggttgaactcctcgcggcccggcgccagcgtggccggcacggccacctgcccgccacgcacccagccgcccttcttcacgaagtagttggcgatggacgagaacacgtcgtcgtagctggtgaacaggtcgcggcggccatcaccgtttccgtccacggcgtagtcgagatagctggacggcatgaactggcccatgcccatcgcaccggcataactgcccttgagcgtggtgatatccagtttctcttcgtggcccaactcgaacagcttggccagctcatcgcggaagaacagctcgcggcgcacttcgcgttccagcttggccgggtcgccgctgcgcgggtaatagaacgccagcgtgtacagcgcatcgagcacgcgatggctgccagcattcctgccgtagctggtttccacaccgatgatcgcgacgatcacttcggccggcacgccggtgcgctgctgcacgcgatccagttcggcgcggtgttcggccaggaacgcgcggccgccctcgatgcgcgccttgctgatgaacatcggccggtactcattccacggcttgacccgttcggccgggcgcgacatcgcggcgatgatcggctggcgcacctgcgcctggtcgagcacgctgctgatctgctccggcttcaggccatagcgcttggcggtatcggcaatgaagcgggcccgtgcgacctcgaacggcaccggggtgagatcgaccggcgccgcggtggcggcggtggcttcaggcgcggcctcggccgggccatgggctttggcggcgggctggcgcggcgtactgctggcctggggcgaagacggtggggacttcggctgggtcgcgcaggcgaccaggccgagggtgagcatgcaggccagagtgcgtcgaatcatcgtcgcaggttagcaggtcatggatgaattaaaacccctaacaccatgaatcacaacgatttgcctgcgaccagcgggaaatgtgaaggcatcgtgatcgcccttccccattcagatagaggttgccggttgcgtccccatccccgcagacgcaaccggcgaccggatccggtcggtacctgcgcggctgccgctccccagtggcagtaccccgcgctccctgtacccgttggatcagtactgcttcccgcccgacgccccctcgcgctgcaacgattgacggcgcgccgtgccgaacgggccgccattgtgcaggccgattacgacaagtccattgatcaagatcaacgcggtgtaaaagtgtgaaccagctaacgttttttgcggactttcgtcagcgggcgtgctgtcgtgcatcggtgtgagaacgcttacacaacgggcgttgcgcagtcaggaagtttccaaccaacggcgcagcccctcgtgggtggccgcgaaaagcagttcatgggtggggccgggtagacgggctgcgcaggggccgctgcaagtacgtccatgtaagcttggtcgccgcatccatgcggctcacgcccctgcgcagcccctctacccggccacggacaggttccgtgcgcgtctacccacggcgaagtaaagagaagatcaaaagcaaaggcggcctggcgggtcgcttcattgccgtgtgtagagccgagccatgctcggctcacgagcaagcgcagcgtcgcgatccgcttttgatcttctttttcttctccgtgggtggacgaacacggaatctgccagcggccgggtgggtgggcagtgcggggtgtccgcggcatggatgccgcggccaagcccccatggatgggttcacggcgtccccgcactgcccacccacccggccagccctcagcaatccggctttcagcgacccattccacccacgaggggctgcgccgttggctggaaaccctatcccccgtgcacgggccggtgcccgcgtaccgccatcaccaacccgatgccggccaacagcgaaaccgccgatgtcccgccgtagctgatcagcggcattggaatgcccaccaccggcagcaggccggaaatcattccgccgttcaccagcacgtagacgaagaacgccagccccaggctgccggccagcaaccgtgcatgcgtgtcgcgcgcgtgcacggcaatccacaggcaacgcccgaccacgaacaggtacagcgcgaacagcgtcgccacgccgatccagccgaactcttcggccagcaccgaaaacgcgaagtcggtggtgtattcggggaggaaatccagcgtggcctgggtgccctgcccccagccgcgtccctgccatcccccggagccgatcgcgatgcgtgactgcaggatgttccagccggtgcccagggggtcggccgccgggtcgaggaaggtcaacacacgatccttctggtactgacgcagcagaccgaaccacgccagcggcgcggccactgccagccccgccgcgccggtcgccacccagccccagtgcaggcccgccagcaacaacgcgaacacgccgctggcggtgaccagcgtggcggtgccgaggttgggctgcatcaggatcaacaccgccggcgcgccgatcagcaccgcggcggtcagtaccgtgcgcggcgacggcggcagcggttgccggtgcaggtaccaggccatcatcaacggcaggctgagcttgagcagctccgacggttgcaggtagaacacgccgaggttgagccagcgctgcccatatttgccggtgccgatcacatacaccgccatcagcggcagcatcgacagcgcgtacaacgctggtgtccacgcgcgcaggcgcagcagcgaaacacgtgacagcagccacatcgccagcagtccacccgcaaagcgcgccgcctgcccggccaccggcccggacacactgtgcagcaccgccaggcccgcgcccatcaggatcagcaatgcgaccagcaacggcagatcgatcgtgcgcactgcctcacggcagccgccaaacagtcgtttccattccacgcgcagcacgctagcaacgggcgcttgcgtgaagctgtcagggtgcttctgatctccgtagccgggctgtggggtcagatcccttttccctgtggaaaaagggatctgaccccgacgccgtactcagccgtagccgccgtgcaccgggttgtgactgcgcaccgccatcaccaatccgaagccggccagcagtgacaccgccgaggtaccgccgtagctgatcagcggcatcggcacgcccaccaccggcagcaggccggaaatcatcccgccgttcaccagcacatagacgaagaacgccaggccggtggcgccggccagcaggcgcgaatacgaatcgcgcgactggctggcgatccacaggcagcgcccgatcaccaccaggtacagcgccagcacggtggccacgccgatccagccgaactcctcgctcagcaccgagaacgcgaagtcggtggtctgttcgggaatgaagttcaggtgcgactgcgagccctcgccccagcccttgccatcgaagccgccggaaccgatcgcgatcttcgactggatgatgttccacccggcccccagcgcatccatctccgggtccaggaacatcatgatgcggtccttctggtacggccgcagcaaccagaaccaggccaccggcgcgaccgcggccacgccacccacgcccaggccgacccaccaccacggcaggccggccaacaacagcacgaacacgccactggcagcgatcagcacaccagtaccgaagtccggctgcagcatcaccaggccggtgggcacgccgatgatgaccagggccacgagcacggtgttgaagcgcggcggcagcggcatcttgtgcaggtaccaggccaccatcatcggcaggctgaccttcagcagctcggccggctgcaggtagaagaacttcaggtccagccactgccggccgtacttgccggtgcccagcacgaacaccgccagcaacgggatcatcgagatcgcgtagatcatcggcgtagccgagcggatgcgcaggatcggcacccgcgagatgccccacagcgcggccatgcccacggcgaagcgcgcgccctgggccatcaccaggctgtcgccaccggcgctcttcagggtggccaggccgatcaccatcagcgtccccagggccaggcacagcacccagtccagcgtgctgaagaagcggcgcagcatgtcgccggcccagcgcaggaacactctcatcgtacgggctccgcgacggtcgggcgtggcgtggcgggcaacacggcggcggccggcgtcgccggctgcggtgcgggtacaggttccggcgccggcacgccgaccagcaccggatgttcacccagctgcgccgcggcgaggtcgccagcctggcgcgcgccggcatcttcgttgtcgaacgcggtggcgccgatggcggtggtgccgcgctcgctgtccagtggctgcatgccttcgggcatcttgcccagcaggtaggcgtcgaacaccttgcgtgcgatcggcgcggccgccgaaccaccatagccgccgccttccacggccaccgcgatcgcgatcaccgggttttccaccggtgcgaagccgacgaacagcgcgcggtggcgcaggtgcatcggcaggctcttcggattcaccgccgccgtgccctttcggctgatgacctgcgcggtaccggtcttgccggccatcacgtacggcgcacccaccgccacgcgccagccgctgccgccgggccgcatggtcgccatcatgccctcgcgcacggcctgcacgttggcggggttggggctgaccggcttgctctcgccagccggcatcgccgaccagtcgctgtcgaaaccctcgcgctgctggatcaccaggtgcggggtgcgcagctggccgtcggccagaccgctgacgccgcgcgccagctgcagcggggtgaccttccagtcaccctggccgatgctgatgttgaccgtatcaccggggtaccaggcttccttgcggctcttccgcttgtaggccggcgacggcaggatgccgccgatctcgccggtgaggtcgatgccggtcggctggccgaagccgtagtactccatgtaatggtcgaagcgctcgatgcccaggtccagcgccagcttgtagtagtaggtgttgaccgattcggcgatggacttgcgcaggtcggtccagccatggccgccacggtgggcgtcaccccagccgcgggaagtgcccggcagatagaacatgccggtggacagcaccttgtcttccgggcgtcgaacgcccgaatccaggccggccaggccgatcagcggcttcagcgtggaaccgggggcgacgccaccgagcaccaggcggttgaactgcggccgcgacgggttttcgttcagcgccttgaagtcggcatgcgagatgccgttgacgaacaggttggggtcgtaggacggcaggctgaccatcgccagcacttcgccggtgcgcgggtccatcgccaccgccgagccttcctggtcgccgaaggcggccaccatggcgcgctgcaggtcggcgtcgatcgacagccgcaggtcggcgccggattgcgcggcgacgcggccgatggtgcggatcgcgcgcccctgcacgttggtctcgacctgctcgtagccgaccttgccgcgcagctgctgctcgtagtaacgctccaggccggacttgccgatgtgggtcagcgcggcattgccttcgccgaggatctccagatccttgtcatcaacgcggccaacgtagccgatgatgtgcgcgaacagatcgccgtaggggtagcggcgggtcaggtagggctccagctcgacgccggggaagcgccagcggtcgaccgcgaagcgcgccatctcctcgtcgctcatgcgcagcttcagcgtgaccggcaggaacttgcggcgcgccttgcgcgacttgttgaacgcttccagctcttccgggctgatgttgatgatcttcgccagcccttccagggtggcgtccatgtccttgaccttgtccggggtcacgtccaggcggaaggccggcacgttctcggccagcaggcggccattgcggtcgtagatcatgccgcgcccgggcaccaccggccgcggcttgatgcggttggcttccgagcgcgtggcatagacgtcgtggtccagcacctgcagcttgaagtaccagctgcccaggcccagcaggcagaccagcacgcccaggaagcccagcgccgcgcggcggcggaactgttcggcttcggcgtgcgggttcttgacctggcggcgcgggatcatggctcagcgcccgcgcttgccgaagcgcaccgcgtccagcagcacgaacaccagcggccacaggcccatgcccagcagcggtgcccaccagtacgaccacggcagggtcggctcatccaccacgatgtggaccagcgcgctgacgatgcggtcgttgaacagcaggccgccgatggccagcatctgctgggacatcgggaagaagcggatgcgggcgcggaagcgctgcaggatgaaggccagaatcaccagccgcagcgcctgttcgcccagcacgccgccgtacagcaggtcggcaaccacgccgctggcgaaggcgatgcccaggccgacgcgttcgggagcttcgatgacccagtacgccagcaccagcgccagccagtacgggcgcagcggctgcagcagcgccggcaacggcagcaggcccagcagcagcgccaccaccaggctggccggcagcacccacgggttgtcgcgcaggcggctcatcgctgggcctccggcgtggtcggttgccggccagcggccggcactaccgtggacccggctggggtggagcccccctcttgttgaggggggcgcgccgaaggcgcgggggtaagggaggatgcgggggcaacagtcctcgtttgcgacgagggctgttgccggccagcggccggcactaccggggagctggccggagccggcatcgttgccgctggcgcggctcccgcgggcacgctggcgccggtggccggcccccccggggcggtttcttccagctgcaggcgcagttccggcggaatgcggatcgccgcgcccgggcgcagcagcagcacgtcgcggccgcggtcgagctgggccgccggcttcagttcgccgaccaggaaggcgtgggtgtcgtccgggcgcaggccggtgatggtgccgaccgggaagccggccgggaaacgcccgccgaggccggaggtaacgatctcatcgcccacttccacgccggcgctgagcggaatgtcgcgcagctccagcgtatcgccgcggccgtagacgatcaggcgcacgccgttgcgggccacggtaacgggcaccgcgtggtcggggtcggtcagcagcagcacggtggaagtgccgccggtgacactgatcacctgccccatcaagccgccggcatcgatcaccgcctggccgacgtgcacgccttcgcgggtgccggcgtcgagcaccaggcgctgcttcaccgggtccaggtcgatgtccaggatcggcgccagctgcacgtccaggccgctgcgctcggccacgttcagcagttcgcgcagctgggcattgtccagcgcggcggtctgcaggcgggtcaggcgcgcgttggccagcagcagctggttgcgcagttcgcgattctcggtcaccagctgggtatggctggcggcggaatccttgacctggttgccgagcttgccgggcaggccggccagcgcccacaccggctgcaccaggctgttggcctgctcgcgcaggcgcgccagccagccggcctggtcatcgagcacgatcagggtgatggccaacgcgagataggccagcaaccgcagggggctggcggcatcaccggatcgggaggcaacgggaggaccggcgtagggcggcacggcaacgattcaactggcagaaggcgaaagggaaacacgcgggcgccccgccggtgccggcccgccatcacggcgggccgcaccccggaagggcgcggcaggcaggaacggccgggacggcttattccggcgcaaagaactcgttgccgtgcatgtcaaccagctccagcgcacggccgccaccgcgggccacgcaggtcagcggatcgtcggccacctgcacgtgcaggccggtttcctcggagatcaggcggtccaggtcgcgcagcagggcgccaccaccggtcagcacgatgccgcgctcggcgacgtcggcgcacagttccggcggggtctgctccagcgccagcttgaccgcgctgacgatgcccgacagcggttcgtgcagggcctcgagcacctcgttggagctgatcttgatcatcttcggcacgccctcggcgaggttgcggccggagatttccatctcgatcacttccgcctgcgggtaggcgcagcccagctcgaccttgatgcgctcggcggtggcttcaccgatcagcatgccgtggttgcggcgcacgtagttggtgatcgactcgtcgaagcggtcgccgccgatgcggaccgaggccgaatagacgatgccgttgagcgagatcaccgccacttcggtggtgccgccgccgatgtcgatgaccatcgagccacgggcctcggtgaccggcatgccggcgccgatcgcggccgccatcggttcttcgatcaggaacacgtcacgggcaccggcttcctcggccgattccttgatcgcgcggcgctcgacctgggtcgagccggccggcacgcagaccagcacgcgcgggctcgggcgcagcacgcgcgatttgtgcaccttcttgatgaagtgcttgagcatcgcctcggtgtaggtgaagtcggcgatgacgccgtccttcatcgggcggatggtggtgatgtgacccggggtacggcccagcatctgcttggcttcggcgcccacggctgccaccgagcgggtgccaccgatggcacggtcctggcgcacggccacgaccgacggctcgttcagcacgatcccctgcccgcgcacgtagatgagggtgttggccgtgcccaggtcgatggacaggtcgttggagaacatgccacggagtttcttgaacatctgaggaaggagtcctgaggggtgtcgtgcccgccgcgggatggcgaaaaaatgggcagaaatcgaggccgacaagcctagcaacccgcctgccgccgagcaaggaaaaaactagctgaacccgcgtcttcacaggctttcggcctgatcgggcatcacccggttctggccctgagcggcaccagcgggtaacctttgcgccgtcgggcgcccaagggcgccgtttgcttgcccgctgaaccgggctggcccaccccaaaattcaccgcataggcttacatcgatgtccgctctgatctgtggttctcttgccttcgacaccatcatggtgtttccggaccagttcaagaatcacatcctgccggacaaggtgcacatcctgaacgtgtccttcctggtgccgcgcatgcgccgcgagttcggcggctgcgccggcaacatcgcctacaacctgcacctgctgggcggccagccgatcccgatgggcaccgtgggttcggacttcggcccgtaccgcgagtatttcgaaggcctgggcatcgacctgtcgcgcgtgcgcgtgatcgatgagctgttcaccccgcaggcgttcatcaccaccgaccacgacaacaaccagatcaccgccttccacccgggcgcgatgatgcgttcctacgagaaccatgtgcgcggcgtgccgggcgtgaccctgggcctggtcggcccggatggccgcgaaggcatgatccagaacgcgcaggaattccacgaggacggcatcccgttcatcttcgacccgggccaggccatgccgctgttcaacggccccgagctgcgcgccttcatcgaccaggccgactacgtggtggtcaacgactacgagtcgaacctgctgcaggaacgcaccggctgggacgaaaaggagatcgtcagccgggtcaaggcctacatcaccacccgcggcccgaagggcgcggtcatccacaccccggaaaagagctacgacatcccgccggcgcacgagcgccgcgtggtcgacccgaccggctgtggcgacgccttccgcgccggcctgatctacggcatccagaagggctacgactggctgaccatcggccgcatgggcaacctgatgggcgcactgaaggtcgagcacccgggcacgcagaaccagcgcttcaccttcgatgagttcaacgagcagttcaagcagcagttcggttacgcgctgggcgcgtaagccgcactgcccgcgcatcgctcggtgggtgtcgacctgggtcgacactgccggccgacggccggcactaccggaacttccgaccgacacgttgcctgctctctgtagagccgagcccatgctcggcttgcgcgcgcctgcgcgatctgaccgcagagcagccgagcgtgggctcggctctacacggtcatgcggcctgccaggccgccaacagcgcgcggcaatcggcgaaatgccagtcggcacggccgggccacgggttttccggcaggttgaccagtacggtatgggcgcccgcggcgcggccgcactccaggtcgtaggcgtggtcgccgaccatcaccgcctccctcgctgcaatgccccagcgccgcaggtgctgctgcaggccatccggcgagggcttgggcaccgcttcatcacggccgacgatgtcggcatcatcgaacagttccccgaccccgatcgcgtccagcgtcagcttcgccagcgcatgatcgttgcgggtcaggatgcccagccggcaaccgtcggctgccagcgcacgcagcagcgtcaccgcacccggcgccggcagcgcctcctcggccagcacacgttcgtgatccagcagccactcacgcttggcctgcgccggcgcatccggcaacgctgcgatatggtccaggatgtcctcctcggccgcgatctgcagcgcacggcggatcgcggcgaaatcatgcacggcgacggtcagcgtgccatccatgtcgaagacccagtgccggatcgcggacaacgcgtgcactgcgctgcccgtcgcggtcatcactgccaccactgcggcatgcgactggcgtcgacaccgccggtctcgaacacggccgtacgcgtgccgccagccttgaccgggaactcgatgctgatcgacttgcccttgcgcgccagcttccacaacgccttctggtcggtgatgaacagggcgatggcttcatcggtcttcgggcgccaggccgccatcgacaccggcttgccatcgtccacggtcaccttcaccgtgcactgcgggcagcggaaatcgccggcctgcagcaccaggtaagcgtgccgcttccactccgggtgatcgcggaacaccagctgcaccggcttggcgccgctgccatccacgtccacccgttccttgctgtagatctgcgccgaaacctggttgccctttttgcccaccgggatctggttgtactgccacagcgcctgcatgcggcgcaggtcgcgcgcggcatcgcccttggccttgacctcgtcgaagcccgcggcgatgcgctcggcggcggcggtgtccttgtactggtccagcagcgaggcgccatgcaggcgcgcgcgttcccagtcctgcgcggccacggccatgtcgtactgcttggccacgtcctcggccttggcttccttctgcgcctgcacggcggccgcggcggcttcctgcgccttgcgctcttcctcggggttgctgcaggcggccagggccagggtgcaggcggtgagcaggatcagtcgtttcatggcggaggtcctatgcgagtgcatcccgattctatcggcagcgaaaagcggatacagcaacggcgggtttccccgccgtagctggtgaagcagtgaccggttgccggccagcggccggcaccaccggttacttggcttcagccttggccagcatgtcctggaccgaggccgtggtgatcgggtggtagcccggcttggccttttcaaaggcctgcttggccagctccagccccttcggggtcttcaccagttcggcgtagatcggcaggatcagcttgcgacggccgacgcgctcgatgaacgcggcagcaccttcattggcctgctcgtagccgctgcggatcgccagcgggtaccagcgcatggcgatctcgccattcggggtgccggtgaagtggaacgccttgtccagcgtggccagcttgtccagcggctgggtcgcacccaggccgtcgatgaagcgcacccattcctgcgtgctccagtcggcgatgacctggctgctcggcacggtgccggcgctggcgaaggcaatgcgcgcggtatcgacgctgctgaagttgcgcgactgcgccttggccgcgaacgccggaatgcccggctcgtccagccacgccttcagttcggcctcggtcactgccgagggattcttcggcagcaggttcttcttcatgtacgcgacgaactggtcggtgttcgcgctctggaaggcatggtcatcgaaccagccgcgcaggaacggatcgaaggtctcgcggccgaagcgctgctccaggaattccaggaaccacgaacccttgacgtaggcgacctggctgagggcttcgtcggggtcacgctcgttcagcggcggcagcgccagcgcctggtcggccgggctcatgtccttcacttcggccagcaggtcggtctggtcgatctgcttctccatctcggccatctccttgccgtacagggcttcggtgatgcggccctggacgtaggtggtgaagccttcattgagccagatgtccttccagctggcgttggtcaccaggttgcccgaccagctgtgcgccagttcatgggcgaccagcgagaccagcgacttgtcaccgacgatcacggtcggggtggcgaaggtcaggcgcggattctccatgccgccgaacgggaacgacggcggcagcaccagcatgtcgtagcggccccagcggtattcgccgtagagcttctcggcggcaccgatcatcttctcggtgtcttcgaattccttggcggccttgttgaccatggtcggctcggcccagacgccggagcggccggagatcggctcgaacaccaggtcgccggcggcgatggccagcaggtaggacggaatcggctgcggcatcttgaaggtgtagtcaccgtcacgcgcggccttcggatcgttgtcggcgctcatcagcaccatcacgtccgggcgcgagaccacatgcgcgctgtaggtgaaacgcacgctcggggtgtcctgcagcggcacccaggagcgggcgtggatggcctgcgactggctgaacatgaagggcagcttcttgccttcggtcatcgacggcgccagccactgcaggcccgaggcggtcggtgcggtgtggtaggtcacttccaccttggccggctgttccggggtctcgatggtcagcttgctgccgaacaccttgtcgaccggggccagcgcgaactgcagcgggctgcgcgcgccatcggcaccgacggcctcgaccttggacacggtcagctcgcgggtgtcgagcaccagctgcctggcgtccttctgcttccattccagggtgtaggtggcggttccgccgatctgcttctggtcgaagtccagcttcagatccagcgcgatgtccttgatgacgaccttgtccggctcggcatacgagctttcgtcgtggctgcggttctcggcgttcacgggggcggcgggggcctttgcggcagtcggggcggcggcgggcgcggccgcctcctgggagcagccggcggccagggccacggccagcggaaggagcatcagcggattacgcatgaatcgggaccgttacggggatcaaaccccaatggtacctccctccggacgcgcaggcgttgcgcggtgcggggtaatggcgggcacagcaccggtagtgccggccgctggccggcaaccccgtcgcccagtgattggccgcgcagatgccggccagcggccggcactacggaacaccgggcttacagcttgtagccggagtggatcgagacgatgccgccggtcaggttcttgtagtggcagcgctcgaagccggcctgccccatcatcgccttcagttcgtcctgcggcgggtgcttgcggatgctctcggccaggtactggtagctgtccgagtcattggcgaacagcttgcccagcttgggcaggatcttgaacgagtggaagtcgtagatcggcttgaaccagtccgcggtgacttcggagaattccagcacgcgggcctggccgcccaccttcagcacgcggtacatctcgcgcaggccagcgtccttgtcggtcacgttgcgcaggccgaaggcaatggtgaccagatcgaagctgttgtccgggaacggcagggcttcggcgttgcactgcacgtagtccaggccgagcacgaggccgcggttggtcaggcggtcacggccgaccgacagcatgccggcgttgatgtcgcccagcaccaccgagccctcggcgccgacgcgctccttcagcagggcggcgatgtcgccggtgccgccggccaggtcgagcacgcggtcgcccggcttcacctgcgcggtggccacgtagtagcgcttccacgcccggtgcacgcccaggctcatcaggtcgttcatcaggtcgtagttgcgcgcgaccgaggtgaacacctggccgaccagcttctgcttgtccttggcggcgacgtcgcggaacccgaaatgggtggtaccggctttgtagggggattcgctcatggccccgattatcgcaccgccgggggccagcggcaccccctgcccgtatgatggcgggccacgacttaccggagccccgcatgatcaccacgcccgactaccaggccctgctgcagaccgccatcgccgaagcccgccagggcctggccgagggcggcgtgccgatcggcgcggcgctgtaccacaacgacggccgcctgctcggctgcggccacaaccgccgcgtgcaggaaggcgacccgtcggtgcatggggaaaccgacgccttccgcaaggccggccgccagcgccgttaccaggacaccatcatggtcaccaccctggccccgtgctggtactgctcggggctggtgcgccagttcaacatcggcaccgtggtggtgggcgaatcgcgcaccttccagggcggcatcgactggctgcgcgaaaacggcgtcaacgtgatcgacctggacaaccaggaatgcgtggacctgctgggcgatttcatcagccgtcatcccgacatctggaacgaggacatcggcgaatgagccacgcgcgctcgtctctgcaacacatttaatgaacgcttcagcgccggtgcgcccttgtgccggcggcctttgcgggcatcggcgtgaccgcgcgcacagtcagccaggtcacgcgcacacattgcggtaacaccccacgcggctgacacgcctacggtgggttcaccggggcaccctttccccggcggagccagccatgtgcgcgcacgccgtacgccctacgacagacccgatcctcgatccgatccgcgaacgcttgcagcagcaatatgcgctgcaccggcgcggcgcgccgttctggactgcctatcagcacatgcaactggagctggtccgccgccacccgctcgaccacgaacgcctgtgcaatgcgatggccactctggccgaagacctcggtgcggtcgaacatgcgcagttgatcggccatgccaacgcaggctccacatcccgctgacgcggcatgcaccgccatatacgccacactcggatgaacccccactccctttccactcaaccgaactggattgtcatgcacgctgaagtccccaccattcctccggtcatcaacgttgacgccgagcttgaccactggcgccgccaacatgccgaaggcgcactgccgcacaactcgttcggctcgtacgtgccgtggatcaagttcgcctgtgattcgctgatcacccagccgcgcgccagcgaggccgaacgtgacgagatgttccagacccaatacgccctgcagatcatgccgcggctgagcgaagcccaggcccgtgagttcgtcgaccgttgctggcagcacgtctaccagagcagcccggtgcgcagcctgcaggcgccacgactgcagcgcatgcgcgcctgaccgccgctgcacaacccctgcacgggccactgccgatcatcctcgtcacctgagtgggacgacgacgatgaaagcacgcaacctgttcaatacgatcgccaagaaggccgcggccgccaccggctcgccgtgcaccttcctggctgcagtagcgatcgtggtgatctggggcatcagtggcccggtgttcggtttcaacgacacctggcagctggtgatcaacaccggcaccaccatcatcaccttcctgatggtgttcctgatccagcacacgcagaacgcggatactgccgcgatgcagatcaagctcgacgagctgatccgggcgacggccgaagccaacaacgaactgttggatctggaagaactggatgaagcgcgcctggaagagatccgcgccgagtacgagcagatggcgcgcgaagccggcgatgcgctggcgcgcgttcgcgcctgccatgcggcgcggcgcgacgatgaagcggtatagcaggcctccgaatgacaatgccggccaagggccggcactaccctcgatctccaggtaggtgccaaccttggttggcacagggccagccgcctgcgctgacgcatccgtgccaaccaaggttggcacctaccagaagcactgcttacccgcgctcgtgccagccgccgcccagcaccttgtacagggtgatgcggttggcctgctgcgccaactgcgcctgcagctgggtctgctgcgcgttgtaggcggtacgccgcgcgtcaagcagggtgacaaagctgtccagccccgcgtcgtagcgtgcctgcgacaggcgattggcctgttcggccgcttccaccaggcgctgctgtgaactcacctgctcatccaggctgacattcaacgccagcgcatcggccgtttcgcggaatcccacctggatcgacttctcgtactgcgccagtgcgatatcacgatccgcgttggcgatggccaggttggcgcgcagcttgccgccctggaagatcggcagggtgatcttcggcaggaagctccacacacgggtgccgctgtcgaacaggttggacagttcgctggagccgctgccgatgctgccggtcagcgagatgctcgggaagaacgctgcgcgtgccgcaccgatgttggcattggcggccagcagctggtgttcggcggccatgatgtccgggcgctgcagcagcacgtcgctgggcaggccggccggcggcggggccagcgccagcagctgcggttcgatgctgtccggcagcagtgccggatcgagctggccaccggccagcagcgccagtgcgttgcggtcctgggccagctggccgcgcaggcgcgcggcatcggtgcgtgcggtctcgaccaaggtacgggtctgggtcagctccagcgccgaactgccgccgcgttcgtggcgggcctcggccaagcgcagcgaatcctcgtaggtcttcagcgtggcatcggcgatcttcagccgctgcgcatcagccccataggtcagccacgcggtggcggtctcggccaccaggctcagctgcgcgttgcggcggttggcagccacggcgaagtactgctgcagcgccgcctcgctgaggttgcgcacgcgaccgaacaggtccagctcgaactcggccacacccacgcccgcgctgaactgctcggtgacaccggcatcggtaccacggcggtccatctggccggtcacggccacgccgggcacgcgatcggcgcgctgcacgcggtactggccacgcgcgcgctcgacattgagcacggccacgcgcaggtcgcggttgttctgcagcgactgctcgatcacctgctgcaggcgcgcatcggtgaagaaatcgcgccagccgacggcggcgacatcggccacctcgccctgcgcggcctcggccggccactgcgcaggaatcgccggagcgacggcggtgttcttcggcgccagggtggagcagccggccagcgcgagcgtggcggcaatggagaggaacagggatgcacttttcatggggatcacttccatcggtactgccggatggcaggaggcagtgccggccagcggccggcactaccgtttcgataacgccagcctgaggccggcatgaccgtttcaggtcacgtcgtggatctgcgcttgaacacgcgctgcaccaccacgaagaacagcggcacgaagaacacgccgagcacggtgccgacgatcatgccgccgagcacgccggtgccgatcgcctgcttggcgccggagccggcaccggtggagatcgccagcggtaccacgcccatgccgaaggcgagcgaggtcatcacgatcgggcgcaggcggtcgcgcacggcgtgcatgatcgactcgatcaggctggcgcccttttccaggttttccttggcgaactcgacgatcaggatcgcgttcttgctggtcaggcccaccgtggtcagcatcgccacctggaagtagatgtcgcgctccaggcccttgaaggtgttggccagcaccgcgccgaggatacccagcggggccgccagcagcaccgcggtcggtacgctccagctttcatacatcgcggccaggcacaggaacacgatcatcagcgacagcgtgtacagcagcggcgtctgcgagccggcctggcgttcctggtaggacatcgccgtccattcgatgccgaaacccgccggcagctgcttggccagctgttcgatctcggccatggcatcaccggaggcgacacccggggccggttcgccctggatttccattgccgacacaccgttgtagcgttccaggcgcggcgaaccgtagtcccagtgcttggtagcgaaggcgctgaacggcaccatctcacccttgtcgttcttcacggaccagagatcgaagtcctccggcaccatgcggaacgcctggtcggcctgcacgaacacgcgcttgacgcggccacgatcgacgaagtcatcgatgtacgagctgccccacgcggccgccagcgtgccgttgatctggtcgatcgacagtcccagcgaggtcgccttggccgcgtcgatgtcgatgcggaactgcggcgtgtcttcctggccgttcgggcgtacgttggccagcttcttgctgcctgcggccaggccgagcagctggttgcgcgcggccaccagtgcctcgtggccctggccgctgttgtccttcaggaagaaggtgtagcccgaggcggtccccagctccggaatggccggcggcgggaaggcgaagatgaaggcatccttgatctggcccagggccgccatcgcacgtccggtgatcggcatcacgccattgtcggcgtcacgctcgctccagtccttcagcttgacgaacgccatgcccgcgttctggcccatgccggcgaagctgaagccctgcacggagaacaccgagtccaccgcatccttctcgttctgcaggaagtggttttccagtgccgcgatcgattccagcgtgcgttcctgggtggcaccgaccggcgcctgcaccagcgccatcagcacaccctggtcttcgttgggcaggaacgagctgggcaggcgcacgaacagcacgcccatcagcacgaacaaggccgccacgatgcccatgaagcgccacggacggtggatgatgccgcgcacgccgcgctggtagctttcgctggtgcgatcgaagccacggttgaagccattgaagaagcgaccggccaggccacggtgggcgacgtggtgctcacccttcttcagcggcttgagcatggtcgcgcacagtgccggggtcagcacgatcgccaccagcaccgacaacgccatcgcagagacaatcgtggccgagaactggcgatagatcacgccggtggagccgctcatgaaggccatcggcacgaacaccgccgacagcaccaggccgatacccaccagcgcaccggtgatctggcccatcgacttgcgggtcgcttcgagcggcgacagcccttcctcggacatgatgcgctcgacgttctccaccaccacgatggcatcgtccaccagcaggccgatcgccagcaccatcgcgaacatggtcagcatgttcaccgagaagcccagcatcgccagcacgccgaaggtacccagcagcaccaccggcacggcgatggtcgggatcagcgtggcgcggaagttctgcaggaacaggtacatcaccacgaacaccagcacgatcgcttcgatcagggtctgcaccacgcccttgatcgacacgcgcacgaacggggtggtgtcgtacgggatctcggccttcaggccggccgggaagaagcccttcatgtcttccagcgcggcatccacaccggccgcggtatccagcgcgttggcgccggtggccagggtgaccgccaggccactggccggctggccgttgtagcgggtgacgaagtcgtaggactcggcacccagctcgacgcgggcgacatcacccaggcgcagctcggcaccgtcctgcgcaccgcgcacgatgatgtttcggaactgttccggggtctgcaggcgcgactgcgcgttgatggtggcgttgagctgctggcccttcaccgacggcgcaccgccgagctggccgatcgccacctgggcgttctgcgccttgatcgcggcggtcacttccggcaccgacaggccataggtatgcagcttgttcgggtccagccagatgcgcatggcgtacttgccaccgaacacctggatgttgcccacgcccggcacgcggctcaggcggtcgacgacattggaaccgacgtagtcggcgatgtcgttggcgtccatgctgccgttctcggacacgaacgcgatgacgttcaggaagcccgagctggacttggccacgttgatgccctgccgctgcacttcctgcggcagcagcggcatggccagctgcagcttgttctgcacctgcacctgggcgatatccgggttggtgccgctctcgaaggtcagggtgatggtggcctggccgttggacgagctgttggaggagaagtagatcaggccatcaaggcccttcatgttctgctcgatgatctgcgtcaccgagtcctcgaccaccttggccgatgcacccgggtaggtggcgctgatttccaccgccggcggtgcgacgttggggtacatcgagaccggcagcttgaacagcgccaggccgccggcgagcatgatgatgatggcgatcacccacgcaaagatgggtcgatcgatgaaaaagcgtgccatggggttctccgcttacttcgcgtcgccggccggggcggcaggctgggcggctgccgccggcttggccggtgcgtcgcccttctcggtggccttgaccggcatgccggggccgatcttctgcaggccttcgacgatgaccttgtcaccggccttcaggccgtcctcgaccagccacttgtcgccgaccgtgcggctgaccttgaccgggcgcacttcgaccttgttgtccttgccgaccaccatcgcggtggtgtcgcccttcggatcgcgcgcgatgccctgcatcggcaccagcaccgcgtcgctgcgcacgccgccgccgatcaccgcacgcacgtacatgcccggcatcagcaggccgtccgggttgtccaccttcacgcgcaggccgaagctgccggtggtcggatcaacgctgacttcggagaactccagagtgcccttgtgctcgaaggtgctgccgtcttccatcaggatgctgaccggcagggtctggttgtcctgcaggcggccggcggccagttcgcggcgcagctgcagcagctcggccgaggactgggtcaggtcgacatagatcgggtccagctgctgcacggtggccagtgcgttggcctggccggcgctgaccagcgcaccctgggtgacgctggacttgccgatgcggccgctgatcggcgcggtgatgcgggcgtagcccagggtgacgttggccgcatccagcgaggccttggcggcaccgacgtcggcctcggcctgcttctgcgcggcgacggcgttctccaggtcctgctggctgaccgcatcgaccttggccagctcggtgatgcgcttggcactcaggcgcgcggcattggcggtggcttcggcgcgggccagctgggcgcgggcgttgttggcctgggcccggtagctggcatcgtcgagctggtacagcggctcgccggccttgaccatgccgccctcggtaaacaggcgcttggccacgatgccattgacctgcgggcgcacttcggcgaccaggaaggcattggtacggcccggcagttcgcgggtcaggcccacggtctcggacttcagcgtgaccacggtgacgtcacccgggccctgctcgggggcctggggttggccgccgcaggcagccacggtcgcggcgattgccagcgacagtgcaaagggtcggattcggctcagcaacatgacggaaaggctcttggaggaaggaatctcagagggagctgatatcgatggacattccccttccggtgaaagcccgcagatcgcgcccacccgggtggagtgggcgccggaccggcctgccacgcacacgacgggaatgatgggtgcgaaatatacatacatgcttgtttgtttgtaaaccggtacaattcagccacgtttcacccgcactcgtacccacacccatggcccgcaagaccaaagaggacacccaggcaacccgggaaggcatccttgacgccgccgaagcctgcttccatgaacacggcgtggcccgtaccacgctggagatgatcggtgcccgcgccggctacacccgtggcgcggtctactggcacttcaagaacaagagcgaggtgctggccgccatcgtcgagcgcgtgcacctgcccttcatgcaggaactggagcgcacctccaccgaccagcgcgacaccccggtgcacgacctgcgcgcggtgatgatccactcgttcatcgagctgtccgaggacgagcgcctgcgcaagaccatggagatcatgctgcgcagcgatgcgtcggcgaacaccagggtgctgaccgaaatgcagcaggccggattccgcgatgcgctggaccggatggagcgtgccctgcgccgcgcccgcgatctgggccagctgcgcgaaggcgccgacccgaaaatcgccgcgcgcatgctgcacgccaccgtgctgggcgtgctgcacggcgcgatggtcgaaccggaactgatggacctcaagcgcgatggcatgctcgcgctggacatgaccctggccgcctacgtgaaggatggtgtgttcgttcccggcaccgtccccgagccgctgcccgaggcgtgaacgaggctgctcccatcactgcggcaccccctgcaagggcagatcgatgatcctggacaacgtggtgtggggcttcatcgggtgtggcagcgtcaccgagaagaagagcgggccagccctggccaacacgccgggctcacgggtagtggcggtcatgcgccgcaatgccgcattggccgaagactatgcacgccgccacgcgattccgcgctggtacgcggacgccgatgcactcatcgccgatccggaggtgaacgcggtctacgttgcaacaccgccctccacgcacatgcactacgcattgcaggcgattgctgcgggcaagccggtctacatcgaaaagccgatggccatggaccacgacgagtgccagcgcatcatcgcggccagcgcccgcagcggcgtgcccgtgttcgtggcctactaccgccgtgccctgccccgcttcgcacaggtgaagcagctgctggacgacggcgcgatcggcacagtgcgcgccgtgcgcgccaccctgcaccggccgcattcagtggatgccgcatcgcctgacttctggcggaccaaccccgcgatcgccggcggcgggctgttcgtcgacctgggctcgcataccctggacctgctcgaccatctgctggggccgctgagcgatgtgcgtggcctggccagctcgttgaccggcgcctacgccgccgaggacagcgtctcgatgtgcttccgcaccgggacggggacgcacggcatcgcgcaatggagcttctgcgcgttccgccgccaggatcagatcgagatcaccggcgaccgtggccagctgcgctttgccaccttcgaggacgttccggtggagctggaaaccgaagcgggcgtgcaggccttcgacatcccgaacccgtcgtcgatccagcagccgttgatcgcctccctcgtggacgaactgcgcggcaacgggcactcgccctcgaacggcatcagcgccgcccgcaccagtgcagtgatcgaccaggtgctgcgggactaccgcacccggcaatcgcactgaccgcacaggaaaaaggccgccttgcggcggccttttctgttgcagtgggcggggtcagcgccctcgccacggcgagggatccgaccccaccgggcattacaggatgtagcggctcaggtccgggtcctgcaccagctcacccaggtgcttgtccacgtaggcgctgtcgatggccagggtttcgccgtcgcggtccggtgcctcgtagctgagcgaatccagcaggcgctccagcaccgtatgcaggcgacgcgcgccgatgttttcctggcgttcgttcacctggaaagcgatctcggccagacgatcaatggcatcggcagtgaagctgaccttgacgccttcggtggccagcagtgcttcgtactgcttggtcagcgcggccttcggttcggtcaggatgcgcacgaaatcgttcttgctcagcgcacccagctccacgcggatcgggaagcggccctgcagctccggaatcaggtcgctgggcttggccagatggaacgcgcccgacgcgatgaacaggatgtggtcggtcttgatcgtgccgtacttggtggacacgttggagccttccaccagcggcagcaggtcgcgctgcacgccttcgcgcgacacgtcaccaccacccacgttgtcgccacgcttggcgaccttgtcgatctcgtcgatgaagacgatgccgtgctgctcgcaggcctcgatcgcggcggtgcggatgtcgtcctcgttgaccagcttgcccgcttcttcctcgatcagcagcgggcgcgcggccttgatggtcagcgtgcgcttgtgcgccttggcgccgccgccgaggttggcgaacatcgacttcagctgctggcccatttcctccatgcccggcggggtcatgatgtccatgctgacgttggcggccaggtcgagttcgatctcgcgctcgtccagctcaccgttgcgcagcatcttgcggaacttgatgcgggtctcgttgtcctgcgccgacggctcgttgcgggcgacttccggatcgaagccgatgccaccgctgcggcgcggcagcagcgcatccaggatgcggtcttcggcacgctcttcggcctgggtgcgtacgcgcaccttggcctgttcgcgatagagcttgaccgcggtatcggccaggtcgcggatgatctgctcgacgtccttgccgacgtagccgacttcggtgaagcgggtggcttcgaccttcacgaacggcgcgttggccagcgtggccaggcgacgcgcgatctcggtcttgccgacgccggtcgggccgatcatcaggatgttcttcggcatcacttcattgcgcagctcgggcaccagctgcatgcggcgccagcggttgcgcagggcgatggccacggcgcgcttggcgtcgtgctggccgacgatgtgccggtccagttcctgcacgatctcgcgcggggtcatggtggcggaggaaacttcgatcttcgacatggatgtgctcacggattctttgtcggtagtgccggccgctggccggcaaccaggcacgcgtgcgggggatcatgaggttgccggccagcggccgacgctaccctcacagctcctcgaccaccacgttgcggttggtgtagatgcagatgtcgccggcgatgccgatcgcttcgctggcgatggtgcgcgcatccagttcggtgtgcgccatcaaggcgcgtgcggccgacagtgcatacgagccacccgagccgatggcgatgatgccgtcctccggctcgatcacatcgccggtgccgctgatgatcagcgaggtttccttgtcggccaccgccaacagggcttccagcttgccgaggcggcgctcggtgcgccaatccttggccagttcgaccgcagcacgctgcagctggccgtgcttttccagcttggcctcgaacagctcgaacagggtgaaggcatcggcggcggcaccggcgaagccggccagtacctggccatcacggccgaggcggcgcaccttgcgcgcgttgcccttcatcacggtgtggcccagcgtgacctggccgtcgccggcaatggccacgtgctcgccgcgacggacgcagacgatggtggtggcgtggaaaacgttggggttctgactggggtccatgatgcctccggggtgacagaaccagaggtggggactgcgctgcgcccttcaagccacccgcgaccggctgccgcaggggcaacgttcagctttctccgctgccctcgttgctgcgtcgacgcttcgcgcgcggatgcgcggcgtcgtagaccttggccaggtgctggaaatcgaggtgggtatagatctgcgtggtggcgatgtcggcgtggcccagcagctcctgcacaccgcgcaggtcgccggacgattccaggatgtggctggcgaaactgtgccgcagcatgtgcgggtgcacgtgcttgaacaggccctggcgctgcgccagctggcggatgcggatctgcactgcacgctggctgatcggcccgttgcggccggggaacaccggcgaggccgggccgcccccactttccgtgcgccacgcctgcagggcttcgcgcgcgggccggccgaacggcacccggcgctggcggttgcccttgcccagcacgttcaccaacccgctgtcgaaatccagatcgcgccaggtcagcgcgcagacttcgctcaggcgcaggccagaggaatagaacagttccagcaacgcgcggtcacggcggccgagctcaccctccggctccagctcgaccagctgcaccgcctcatcggcgtcgaggacctgtggcaaccggcgcggtgcgcgcggtgccttcagcgtcgctgccgggctgacctcgatacgcccgtgcttgagcagccaggcatagaagcttcggcaggccgacaggcagcgctgcaggctcttggccgacaggccacgccggtgctcgtcggcaacgaactggcgcacggcctcggcatccagtgcctccaccgccacgccacgcggctcggcccaggccgacagcgcgtccaggtcgcggcggtaggcgtcgagcgtatgcgccgacatccgccgctccacctgcaggtgctgcaggaaggcctgtaccgcgctcatcgtcgtcgcaacctgctcagcccgggaagcgcttcaggccagtgaccagcgcgtcgcccatcatgcgcaggaacaacgtccccatgcccgggtagaagcggttcgggtcgtggctgccgaccgcgatcaggcccacgcccggtagcggcagcagcgcggtggtctgcacttcctcgctgcgcacgccgtacagcacggcattcttttccggctgcaggcggccgcagatcggctcgccatcgttcaggcaatcgcggaacgggcccagctgcggatcatccgcggcaatcacctgcagccagtcggcctgttccagcccggccactggcgtgtgcaccaccagccgcaccaggtcgccggcgaagtcttcctgcagcgaggcggccatcgcgcgcagggtgtcagccgcgttgtcctgcttcatcagcgccagggtcagctggtgcgtgcgcaccgccaggcgctcattgacctgggcggtcgcgcccagatcggccaaccgtcgtgccagctcgcggttcttctcgcgcagcacttccagctggtagctggccagcgacgcggtcgggccgtcgtcacgcggcaccaccagggtcagggccaggtccgggaactgcttgaggaagccgggatgacgccgcaaccaggcagcgacttcatgggccccgagcttgtcgacggtttcggtcatgcgatccactccccttcgaagacgaatgcggtcgggcccgccatcaccaccggctggccatcgcccgaccactggatgcgcaggtcgccaccgggcaggctgatgcgggcatcgcgctgcaggcgaccgcgctgcatcagggtcaccgcggcggcacaggcaccactgccgcaggccagggtctcgccgacaccgcgctcgaacacgcgcaggcgggcgtgggccgggctcatcacctgggcgaagcccacgttcaccgagcgcgggaacgacgcatgctgctgcagcagcgcaccgacgcgctcgaccggtgcagcatcgaccaggcccacttcgatcaccgcatgcgggttgcccatcgacaccgcggcgaagcgtacgctctcgccctgcagcggcagcaggtattcctcgcgcgcgtgcgcaaagcccatcagcggcacgttggccggctcgaaggcgggcacgcccatcgtcaccgcaaactgcccttcgcccagcaccttcacttcatggctggccagcgggctgtcgatgacgaatgcaacgccctgcgcactgccctcgcgcaccagccaggcggcgatgcagcgcgcgccgttgccgcactgctcggaattggagccgtcggcattccagatgcggtacgaggccaccgaaccgtccgcacgtggtgcctcgatggtcaggatctggtcgcagccaacgccggtgtggcggtcggccaggcgcgcggccagctcgggcgtgggcggtgcggtgccgtcacgcaggtcgatcactacgaaatcattgcccgcgccatgcatcttgctgaaacgcagggccctggaaccggccttactcattcccgctgcccgccttcttcgcgggcgtgggcgccggctgggtggccggtgcggccggctccacggtcgtggccggggtgccgctgccctgggtctgcggcgcggtcgcctcggtggcgggctcggcagcgggttcgacggtttcttccaccggcaccggcttctgcggcagtaccagcgggcccttgttgccgcaggcggcgaggagcagcagcgaggccgctgccagcggaatcaggatggcgtttcgatgggggatcttcatgccccgagtatagccattggcggctgagcggttggtgcagggaatcgggtggccggccagcggccggcactgccgccggcgctcaatccgcgggcggtggtggcagcggccgcgtccacagccagattgcgaccacggtcatgctgccgatcgagaaccacttcacccaggcgatcggcacgcaccacagcatgatgccggcgcataccgccatggtgatcgtggccatccacttgccgtagcggctgaccgccccgtgtgcctgccagttggcgatggccgggccgaaacgcggatgctgcagcagccaggtatgcaggcgctccgaaccgcgcgaggcggcccaggccgagatcaggatgaatacggtggtcggcagccccggaacgaagatgccgacgatgccggtgcccaggctgacgtacgccagcagccaccatgcccagcggaaacgcaccacgcgcggcggcgtggcgctatcgcggggtgcagatggctcgggctggctcatggccgcaaggataccggttcggggtgccaggcagcgcccggcgccccttcgccgttacggctgggcgatgcccagctgctgcagcacgaacgcgtacgactcggacagttcgcggtagcgctggaagcgccccgacttgccgccgtggccagcttccatgttggtgcggaacaggatcgggtagtggccggtgttgtcatcacgcagcctggccacccatttggcgggctcccagtactgcacctgcgaatcccacaggccggtacccacgtacagcgccgggtacgcctgctgcttcacgttgtcatagggcgagtaggacagcatgtagtcgtaatacggcttctgctccgggttgccccactcgtcgtattcgttggtggtcaacggaatggtcgggtcgagcatggtggtgaccacgtcgacgaacggcacctgcgccaccatcacccggtaatcctgcggcgcctggttggccaccgcgcccatcagcaggccgccggcgctgccaccggacgcggccacgcgatccttcgccgcccagccctgtgctaccaggccacgggtgacgtcgatgaagtcgttgaaggtgttctgcttgtgcagcagcttgccgttctcgtaccagtcgcgccccatctcctggccgccacggatgtgggcgatggcatacaccacgccacgatcaagcaggctgaccgcggtctggttgaagtacggatccatcgacatgccgtagctgccgtaggcgtactggaacagcgcgcccttgccgtccttctggtagcccttgcggtagaccagcgacaccggcaccttcacgccatcgcgcgcggtgatccagacgcggtcggtctcgtacttcgaggcgtcatagccgatcaccggctgcaccttcagctggcgacgctcgccggtggcggtgttcagctcgaacacggtggtcggggtggtcatcgaggtgtagacgtagcgcagccacggcgtatcggcctcggtgttatcgcccaggcccatcgaataggccggctcgtcggccttcacgtagtcgctgcgcccgtccttgaacagcaggcggatgcgctccaggccctcggaccgttcggcgatggcggtgtacgtgtcgaacagttcgaagccttcgatgaacaccgcatcgtcgtgcgcgatccaatccttccattgcgcgcgcgaggtggcatcggtcggcgcggtgaccagcttgaagttcttcgcaccgtcgttggtgcggatcacccagcggccgtcatggtggtcggcgtcgtactcgacatcgcgctggcgcggcgccagcacggtgaaggtggtcgggtcgctggccggcgcgtagcgctcttccgaggacacggtgctgtgcacgccgatggtgatgaagcgatcgtcgcgggtgcggccgatgcccatgtagaagctgtcgtccttctcttcgtagacgacggtgtcggcgctggccggggtgcccagcacgtgcttcttcacgcgcacggtcagcagcgtttccggatcgttctcgacatacagcacggtgcggttgtcgtcggcccagaccaggtcgccggagctgccggtgatcacatcgggcagcaccgtgccggtggccaggtccttgaagcggatcgtgtactggcggcggccgacgtcatcgtcggcccaggccagcagctggttgtcctggctgacttccatcgagccgacgctgaagtagcccttgccggcggccattgcgttgacgtccagcaggatttcctcggccgcctccatgctgcccttgcggcgcgcgtggatggggtaatcctggccggtctcgaagcggctgtagtaccagtagccgcgctcgcgcgccggcacgctggaatcatcctgcttgatgcggccgacgatctccttgtacagggtgtcttccaggggcttcagcggtgccagcagctggtcggcgtaggcattctctgcctgcaggtaggccagcatgtccttgttctcgcgcttgtcgtcgcgcagccagtaatagtcatcgttgcgggtcgcgccgaacggcgccttgaccacgtgcggatgcttggcggcatccggcggaacgggcggcgtggcggcggtagcagtcgtggtcatcaggctggcgagcaacaggcagagagtggacttcatgagataaggctcctggcgcatcaatgcaatggtcttcgacggggtcagatcccttttcccgaaagggatctgaccccaatcgcggcaatgcggcaaccctgcggaacgtcatgggttgcgccggccggcgtaccatgggcacatgagcaccccgccccacacgccgggctacagccggcgcagccatgaaatcgctccgttccacgtgatgtccctgctggcccgcgcgcaggcgctggaacaggcaggccacgatgtgatccacctggaaatcggcgaaccggacttcactaccgccgaacccgtcgtgcgtgccggccaggccgcactggccgccggccacacccgctacaccgccgcgcgcggcctgccggcgctgcgccaggcgatcagcggtttctaccgcagccactatgggctggatgtcgatcccgaacgcatcctggtcaccccgggtgggtccggtgcgctgctgctggccagcagcctgctggtcgatcccggccgccactggctgctggccgaccccggctacccctgcaaccgccacttcctgcgcctcgtcgagggcggcgcgcagctggtgccggtcggcccggacaccgcctaccagctgaccccttcgctggtggaacagcactggaatgacgacagcgtcggcgcgctggtcgcctcaccggccaatccgaccggcaccgtgctgtccgccgacgaactggcggcactgtcgcaggccctgcacgcgcggggcggccacctggtggtggacgagatctaccacggcctgacctacggcctggatgcgcccagcgtgctgcaggtggacgacagcgcgttcgtgctgaacagtttttccaagtacttcggcatgaccggctggcggctgggctggctggtggcaccgcctgcagcggtaccggacctggaaaagctggcgcagaacctgtacatcagcgcctccagcatcgcccagcacgccgcgctcgcctgcttcagcgaggaatcgatggcgatcttcgaacagcgccgggaagcgttccgccaacgccgcgacttcctgctgcccgcgttgcgtgagctcggcttccgcattgaagtcgagccgcagggcgcgttctacctgtacgccgatgtcagcgcgttcaccgacgacgcgcaggcgttctgcgcgcacttcctggaaaccgagcacgtggcgttcaccccgggcctggatttcggcttccatcgcgccaaccagcatgtgcggctggcgtatacccagcaagtaccgcggttggaggaggcggtggcgcggatcgcacgcgggttgaagcgttggcagggatcacgttgacggcagtgccggccgctggccagcaacccgggaatgcctgaatgatacggttgccggccagcggccggcactaccggtaaagaaaaacgccgccctggggcggcgttttccgttctgcttacttgccgcccaaccgctcccacaggaagctgtaggccagcgcggacatatgcgcggcctgtgcattgttggctgcgccgccgtggccgccttcgatgttctcgtagtaggtcacgtccttgccggcgtcgatcatcttcgccgccatcttgcgggcgtggcccggatgcacgcggtcatcgcgggtggaggtcgtgaacagcaccggcgggtagttcttcttcgcgttgaacaggtggtacggcgagaaggtcttgatgaattcccagtcgctcgtatccgggttgccgtactcggccatccacgaggcgccggccaacaggtggctgtagcgcttcatgtccagcagcggcacctgcaccaccaccgcaccgaacagctccgggtactgggtcagcatgttgccggtcagcaggccaccgttgctgccgccctgcacgcccaggtgcttggcgctggtgatcttgcgcttgaccaggtcccgcgccaccgcggccatgtcttcataggccttgtgacggttctgcttcagcgccgcctggtgccagcgcgggccgtactcgccgccgccgcggatgttggcgaccacgtacacgccgcccttctccagccaggcgcggcccatgccaccggaatagctcggggtcagcgagatctcgaaaccaccgtagccatacagcagggtcgggttggagccatcgagcttcatcgccctgtcgtgcaccacgaaatacggcacgcgggtgccgtccttgctggtggcgaagtgctgctcgatcaccttgcccttggcatcgaagaaggccggcatggtcttcagcgtttccggtgcctggccgatctcggccagggccagcgtggtcggcgtcaggtaatcggtggcggtcagccacaccgcgtcgctgtcattgctgtccaccgcagccacgcccagcgtgccgaaggccggggcgccgacgaagcggctggtctgccagccgtcggcgcccggggtcagcaccgacaggcggttcttgacgtcgtccagcacattcagcaccaggtggctcttggtccagctggcactggccagcgaggtggtcgcggtcggggtgaacagcacgtcgaagtcgcgcttgccggccaggaagtcgtccagcttcgtcgccagcagcgaaccggacgcgtaggtcttgccgcccacggtccacggatcgcgcagttccagggtcagccactgcttgtgcaaacccttctcggccgagttcggcgcgtcgatcttggtcagcgtgccgtcgtcgccacgcaggtagagctcgttgttgtagaacgccagggtgcggctgaccaggttgcgttcgaagcccggggtgtcatcgtgcatcgccgcgatgtacatgtcctccggcttgccttcgtacaccacggtggccgaggccatcggcgtgccgcgcttccacagcttggccacgcgcgggtagccggaggtggtcatcgagccggcaccgaagtcggtgtagacgaacacggtgtcgcgatcgacccagttgaggccgcccttcgactccggacggaagaagccgtccttgatccaggtcttgttggccaggtcgaactcacgggtgacgtcggcgtcggcgccgccgcgcgacagcgcgatcaggcagcggctgtaatccgggcgcaggcagtcggcgccgtgccagacccagttctcgccctcggccttgttcagtgcatccaggtcgagcacggtctcccactgcggcgaggccttgcggtactcggccagggtggtgcggcgccacaggccgcgctcgtgctgctggtccttccagaagttgtagtagtagtcaccgatcttctgcacgccgggaatcttggcgtcggagtcgagcacctcgcggatgctggtctccatctgcttgaaggccggggtctgcgccaggcgcgcctcggacctggcattctgttccttgacccaggacagtggcttgtcgccggtgacgtcctccagccaggcgtagcgatcggtgtcttcagcggccacggcggtccccaccgaggcagcggtcatcatgccggccagcaggcaggcggaagcgagtcgtgacattgcagctccaggcagtcataagccggggaacgctagcacggaatgtcgcggcctcccccgtgtcgaaggtcaggccgtggccgccggaccgcgccggccgcgtgcggcggaagccggccgacggcgcgcctgtccaccggtacgccgcgcccgccatcgccatgacgggtgcggcagcggaaagcgcagcagcgcccaccaggccgcgagcggcatgcccaccagccacatcggcagccagcccagccatgcgctgctgccacgcgccgccggccagaccagtaccagcgccagcccggccagcgccagttgccgcacgccgcgcagcaggcgtgggtcggcgcgttcgatgacgcgttcagttgcagggcgacggacggaacgagcgctcatgggggcttctccggtagacaatgcaacacagcttgggcaagccccttctcacaggatgcgacaccattgacggatcgcgtgcacacagtcgaccatgcgcgtgcaagcccactggagcccgctcccgcatgacttcgatccgcccgttctgcgccgtgctgctggctctgtccctggcaggtcctgccatggccgccagtgagccgccgtcgccccgcgccagcgccaccgacgcggccgacccgggggcgccgatcgacctgaagcgcttcatgggcacctggtatgtgatcggccgcgtgccgaacttcatcgaacgcgggcatgtcgccagcgtcaacgagtacgagctgcgcgacgagcacaaggtcgccatcacctaccgctaccgtgatggcttcggcgaaccactgcaggaaattcgcgcacgtgccagcgtcgatccggacagcggcaaccatggctggcgaacctggttctatcgcgtggtgccgacccattcgcgggtactggaagtggccccggactattcatgggcactgatcggttatccgggccgcgaaatggcctggatcttcgcgcgcaagccggacatggacaaagccctgtacaaggagctggccgagcgcctgcgcgacgagtacggcgtgaacaccgacaagctcaagcgcgtgcctcagcatccggaacaggtcggcaagctgggctacgaagtaccgaacgcgcgttgaccgcacgtggaattgccggccagcggccggcactaccgtttttttcccggcaatcgggtagagccggccgctggccggctgccgcccggcattctgttacttgcggctgtaatgcgcgaccaggcggtcgccgagcatctgcagcagctgcaccaggaccagcaacaggaccacggtgaccagcgccacgtcggtgtgcgaacgctggtaaccatcgcggaacgccaggtcgccgaggccaccggaaccgatcgcaccgcccatcgcggtgaagccgatcagggccacggtggtgaccgtcgccccggcgatcagccccgggcgtgcttccggcagcagcacccgggtgaccagctgccaggtggtggcgcccatcgcctgggtcgcctcgatcacgccacgatccacttcgcgcagcgcggtctcgacaaggcgcgcgtagaacggcgccgcgccgatcaccagcggcacgatcgcgccgcgcacgcccagcgaggtacccatcaggaacagcgtgaccgggatcagcacgatcatcaggatgatgaaaggcaccgagcgcagcaggttcaccaccagagccagcacgccataggcaaacggccggcgcttcatctgcggcgccccgaacaggtacagcagcacgcccagcggcaggccgatggccagggtcagcggcagcgaaccgagcagcatcagcagggtgtcgaaggtggcctggccgatgtcggcccacttgcccgcatccaggtgacggaagaaaccgccggcagtggcgatgatcatcgacgcagctcctcgacatgcacgccggcagccacgaaggcagcctgcgcggcggactggtcaccgcccaccagggcgaccaccagctggccatagggggtgtccttgatccggtcgatacggccggacaggatgttgtagtcgaccccggtctggcgcgcgacgctgccgagcaggggttcgtaggtgtcgccgccgaggaaggtcaggcgcacgatgcgcccgcccaccacgtcgaaatcgcggtgcaacgccccttcgtccacgtgctccgattcgctgacgaaccgccgcgtggtcgggtgctgcggatgcaggaacacccgggtaaccggtccggtctcgaccatctggccagcatcgagcacggccacgcggtcgcagacacggcggatcacgtccatctcgtgggtgatcagcacgatggtcaggcccagctcgcggttgatcttcgacaacagcgacagcaccgaggcggtggtctgcggatccagcgcgctggtggcctcgtcgcacagcaggatctgcgggcgggtcgccagcgcacgggcgatgccgacacgctgcttctggccgcccgacagctgcgccggatacttctgcgcatgcgcttccaggcccacggtctgcagcagctcggccacgcgcgcgtcgatctccgcctgcggcgtgccggccagctccagcgggaaggcgacattgccagccactgtgcgcgacgacagcaggttgaagtgctggaagatcatgccgatgcgccggcgcagcgtgcgcaggccgtccgcgtccagtgcggtgacatcctcgccaccgatcagcagccggccaccgctgggttcttccaggcggttgatcatgcggatcagggtcgacttgccggcgccggaatggccgatgatgccgaatacctcaccggcctcgatggtcaggtccagcggttgcagcgcgctgacttcgcggccggcaacggcataggatttgtgcaggcgctggaactcgatcacgggcgtggctcaccggctggggacggaagggggcgtgcagcctaccagcgcaggcggtcgcgcgcccgcgccatgggccagaatgttattccttttggttctaagccgcccgcgccgacgtgttggctggggtcagagcccctgcggggatccgaccccggggtcggatccccgcaggggctctgaccccattcccaggcccaaccggctcagggatggtccagcggcttcggtggctgcacccggttcaggcgctcacgatgcagcaggtacagtcccgaagccacgatgatcgcggcgcccacccaggtatagccatcaggcagctggccccagaaggccaggtcccagccgatcacccagaccagcccgctgtactccagcggcgcgatcatcgaggcctctcccagctggaacgccttggtcagggcgatctggcccagcgccccggccaggcccatgccggcgatcagcggcgcatgcgccagctgcagcggcacccagccgggaagggacagcaggccggcaccgatggccatgatcaccaggaaccagaccaccatcgactgcgaggtatcggtgcgggtcagcaggctgaccgtgatcgccgccacggcataggcggtggccgcagccagcaccatcaggccgggcaccgagatgaaaccgtccacgcccggccgcagcaccaccagcacgccgaccaggccgatgccgatggcgacccagcgccgtggcccgacccgctcacccagcagcggtaccgacaaggcggcgatcagcaacggggcgacgaaatagatggtgtaggcggtggacagcggcaggtcgcgcagggcgaacacgaagcagccgatcatcgccatgcccagcgcgccacgcagcaggtgcaggccccagcgacgcggcaccagcgagcgcgggccggcgctggccaacacccagaccagcacgaacggcaacgaggccgcgccgcgcaggaaggtcacctccagggtcggatagctggccgacagctgcttcatgccagcgtccatcagcgagaaacaggcgaccgcagcgaccatccaggccaccgcacgcgaaggggagcgttgcacgttcatggcccattatcgcccggtcgtcgctttctgtagagccgagcccacgctcggctactcttcacaaagccgccgagcgtgggctcggctctacaggggacgggcatgcgggccctcgcgatagaatgatcgccactgaaacctgcggagcaccgcccatgccttccttcgacgtcgtgtccgaagtcgacacccacgagctgaccaacgccatcgaccaggccaaccgcgaactggccacccgcttcgacttcaagggcgtggacgcaaagttcgagcgcgagggcgatgtcatcaaccagaccgcgccgaccgaattccagctcaagcagatgaacgacatcctgcgtgctcgtctggccgcacgcggcatcgacgtgctcagcctggagttcggcgacatcgagaccaacctggcccaggcccggcagaagatcaccgtcaagcagggcatcgagcagaagatcgccaagaagatcgcggcggcgctgaaggatgccaagctgaaggtggaaagccagatcaacggcgacaagctgcgcgtgcagggcaagaagcgcgacgacctgcaggacgccatcgccgtgctcaaggccggcaagttcgagctgccgctgcagttcaacaacttccgcgactgaggcatccgccgggcctgccccggcgctgccagcggcaggcacgacggcgcgttgccagcgacgcgcctacaatggcggccccgccagccgacgtgcccgccatgaccgattcccccctgcccaccgatgacccgatcgctgccaccagcctgtggctggagcgcatcgtcatcggcctgaatctgtgcccgttcgccaaggcggtgtatgtgaaggaccaggtccgcatcgtgctcagtgatgcgaccacgccggaagcgctggttgagcagctggccgaggaactggtgctcttgcgcgatacgccggccgagcagatcgataccacgctgatcgtgcatccgcaggtgctgacggacttcctcgactacaacgatttcctcgacaacgccgacgccgcgatcgaggcactggacctgcagggtatcctgcaggtggccagcttccacccggactaccagttcgacggcgtggcagcggacgacgccagcaactacaccaatcgcgcgcccttccccaccctgcacctgctgcgcgaagacagcgtggcgcgcgcagtggatgtctatccggacccggacgtgatcgtcgagcgcaacatccagaccctggaccgcattggcgtggacggctggcatcgccgcctgcgtggcgaagacctgacgtgagcacggtgccgccgattgccgcatggccggccgcgccgctgtcgggcaaggtggtgctggtcaccggcggcgccaacggcatcggccgtggcatcgcacaggccgtgctcggtgccggcggacgcgtgctgatcggcgacctggacgtggaggccggcgaggcgtgcctggcggaatggcagcgtagtggcgaggccgcattccagcggctggacatcaccgacgaagccagcgtgcgcgacttcatcgccgtggccctgcggcgtttcagccgtatcgacgggctggtcaacaacgcgggcatcgccggaccgcatggcacgcagctgcaggacatggactgggacgagtggcagcgccgcctgtcctcgctgcacggtgccttcctgtgcagcaagcacgcactaccggcgctgacggccagcgccgccggcgcaatcatcaacatcgcctcgacccgcgcctggcaatccgaagcgcacagcgaggcctatgctgcggccaaaggcgggctggtggcgttcacccatgcgctggcgatcagtgccggcccaacggtgcgggtcaacagcatcagtccgggctggatcggcaccacggcctggcaggccccctcgcggcgacacgcaccggagtactccgccatcgaccaggcacagcacccggtcggccgggtcggccgccccgaggacatcggcgcgctggcggtgtacctgctgtcgtcgctgtccggcttcagcaccggccaggacttcatcgtcgacggcggcatgacccggaagatgatctacgccgaatagaaaaaggggacggaggggattaagtcgtttgtgcacaaacgacttaatcccctccgtcccctttttttctgtgcacaaacgacttaatcccctccgtcccctttttttcgcttacgccatgcccgagtgccgcagcagcgcgtcgatctgcggcgcgcggccgcggaaggccttgaagttctccgccgccgggcggctgccaccacgcgacaggatctcatcgcggaagcgtgcaccggtttcagccagtgcctgcggcgcttcctcgaacgcggcgtaggcatcggcgctgagcacttcggcccacttgtagctgtagtaacccgcggcgtaaccaccggcgaagatgtggctgaactggtgcgggaagcggttccagaccggcgggtggttcacggccacttccgcgcgcactcggtccagcagtgccagcacgctgtcctgcgccggttcgaactggctgtgcagcagcatgtcgaacaggccgaactccagctggcgcaccgtggccatgccgctatggaaattgcgcgcagccagcatgcgctcgtacagcgcgcgcggcagcggctcgccactgtccacgtgcgcggtcatgccctgtaggtggtcccattcccagcagaagttctccatgaactggctgggcagctccaccgcgtcccattccacgccgttgatgccggccacgcccagttcgccgatgcgggtcagcagctggtgcaggccgtggcccatctcatggaacagcgtggtcacttcattgtggctgaaggtcgccggcctgccgttggcgccccggccaaagttgcacaccaggtagaccagtggcgtctgcacgctgccgtcgccacgcacgcgacggttgcggcaatcgtccatccacgcaccgccgcgcttgccctcgcgtgcgtacaggtccaggtagaactggccgaccagcgcgccctgcgcatcgaccaggcggaagaagcgcacgtcttcgtgccacaccggtgcgctgtcttcctgcacatgcaggccatacagctgctcgatcaccgagaacaggccgcccagtaccttcggttcggtgaaatactgcttcacttcctgctcggaatagctgtaacgcgcctgcttcaggcggtcggcggcgaacgccaggtcccaggcctgcagggcatcgatgcccagctgctcgcgtgcgaactgctccagctcggcgcggtccttggccgcgaacggcttggctcgcgcggcaaggtcacgcaggaaacccagcacttcggccggatcctgcgccatcttggtcgccaccgagtaatggccgtacgaatcgaagccgagcaacgcggccagttcggcgcgcagggcaaggatacggtcgatgttgccactgttgtccagcgcgtcatcgccgaactccgatgcacgctgcgcgctggcacggtacaggatctcgcgcaggtcgcggtcttcaccccaggtctgcaccggcaggtagcacggcatctgcagggtcagtttccagccggtcctgccgtccttctctgccgcagcgcgcgcgacagccttcacgtcttccggcaggcccagcagtcgcgcttcgtcctcgatgtacagcgaccatgcatcggtggcgtcgagcacgttctgcgagaacttcgccgacagcgccgacagttcctccttgatcgccgcaaagcgctgctgcgcctcaggtgccagctcggcaccgcccaggcggaagtcacgcagcgtgttgtccagcaccttgcgctgggcttcattgaaatgcgccgcctccgggctggcggccagtgcctggtactggcgatacagcgccaggttctggcccagcgcgctggcgaaacgggtcacccgcggcaggttgccgttgtaggcctcacgcagttccggggtgttgaccaccccctgcaggtggccgaccaggccccaggcacgccacaggcgctcggtggcgtcatccagcggggtgacgaaggtgtcccaacgcaccggctgcacccgctcggctgcgctgacggcagcttcggcctcggccagcagcacatccagcgccggcgcgacgtgctcggggcggatcgcgtcaaagcgcggcagtccggaaaagtcgagcagggggttggcaacggtcacggcagatctccagggaacgggcccggcgggcgggcagcttcccagatatggcgctgacaggcgcggctgacaagggggcatgcgccggcgttcacgtcggcctgacggccgcgcaccgaagctctggctgcgggggagtccgcagcggtacttaccgaacgaggccctacatggaaggtctggctgcagtggcatccatctcaccggcgcgctcgctggcgctgtccgccagcccggcagaactggcctggatcgccgcgctgtgcgatgccggcgacgacgccccccgccatttggagcagctgcaggcggtattgcagcagggcggcacgttcaacgatgcccaggagtggtacccgttcgaggtgatcgagcgcggcgccagccagttgcagctgggccacgagcgcgagttcgtgatctgcgtgctgctgtggctgcaggcattggcccagggacgcgccagcatcctggaccccagcctgcacctggatgaccgcgcgatggacatcgaggcgttgcctgatgcgctgcgcgatgcggtgctggatgcgttcaccgcagcggggtattgagacgccccggcgaccgggtggagtcgactgtgggtcgactttcgcgcgcagcgcgggattctggcgacctgaacgtggagcggtcgaccaacagtagacgctacccagccgatgcacagccggccgtgcgttgccgcgttacaacgcttccaggctgcaccacggcagttcgggcaacccctgcccggccaccgccgccgccagctgcgcatcggcgccgtcgacatcgattccctgtcgcccataccacgccgggtcgtaatagctctgcgcatagcgctcgccactgtcgcacaggatgctgacgatgctgccctggtggcccgcctcacgcatccattgcgcggcctgcagcacgccgatgaagttggtgccggtggagccaccgacacggcggccgagctggcggctgacatggcgcatcgcggccaggctcagcgcatcgggcaccttcaccatcgcatcgacactggtcgggatgaaactcggctccacccgtggccggccgatgccttccacgcgcgagccaccgctacaggtcagtccacgccagtcctgttcaccggccacggcagccttgtagccgtcgaagaacaccgacacttccgggtccgcgcacaggatgcgggtgtcatgccggcggtagctgacataacggcccagcgtggcggcggtaccgccggtacccgggctgcacacgatccattccggaaccgggctgggctcttcggccatctgcttgaagatggattcggcgatgttgttgttggcacgccagtcggtcgcccgctcggcataggtgaactggtccatgaagtggccgccggtttcgcgggccagcttttccgaatcacagttgaggtcgcaggcgcgctcgaccaggtggcagcggcccccatggaactcgatcgccgcgatcttttccggcgaggtggtggccgggatcaccgcaatgaacggcaggcccagcaggcgcgcgaaataggcttcggacacggcggtcgagccactggaggcctcgatcactggccggccctcgcgcaaccaaccgttggccagcgcgtacaggaacagcgagcgcgccagccggtgcttgaggctgccggtgggatggctcgactcgtccttcaggtacaggtcgatgccctcgaacccgggcagcgccagcgggatcagatgggtatcggcggaacggttgaaatcggcttcgatcttgcggatggcggcggccacccattcacgctgcgacatggcgggcaatcgttatcaggacggaacggtgcgatccggccattgtacgtcgcggtgccgtcaggtgcgggccggtagaatggcgccatccggccggcaacggccccgtctgaaggacctcccccatgaccattcccgccctgcgcgatgtccccggcgtcgccgcccaggccccggccgaaaccagcggcttcgtgttcaaccacaccatgctgcgggtgaaggacatcaccgcctcgctggacttctacacccgcgtgctgggttaccagctgatcgacaagcgcgacttcccggacgcccagttcagcctgtacttcctggcctacgtgccggccggcgcagtggtgccagaagacgacagccagcgccgcctgtggatggccggcctgccgggcgtgctggaactgacccacaaccacggtaccgaaacccaggccggtgcggtgtaccacgacggcaacagcgacccgcgcggcttcggccacatctgcgtgtcggtgccggacatcgaggccgcctgccagcgcttcgaggacctcggcgtgaccttccagaaacgcctgaccgacggccgcatgaagaatctggccttcatcaaggacccggacggctactgggtcgaaatcatcgccaactgacaaaaaggggacggaggggattaagtcgtttctggcactattggccggaagcgacttaatcccctccgtccccttttttgcgaggttcgtatggaaacgatggaactgcaccgcggccgcctgatcgaccacatccagctggtggtgcgtgacctggtggccagccgccgcttctaccaggcggtgttcgacaccatcggcatcccgatcgccggcgaaggcgatgattacttctgggccgatgagctgttcatttccagcgccagcagcgaggccgccgccggccagctgaccggccggcaccatctggccttccaggcccgcgacagcgccaccgtcgatgccttccataccgccgcgatcgccgccggcggcaccgacaacggcgcgccgggcgaacgcccctaccacccgggctactacggcgccttcgtgctcgacccggacggcaacaacatcgaagtggtctatcacggtcctgcgaactacagcgccgactcggtaaaggtcacgttctgatatcaccgaagccgtgaacgaagaagccgggcaatgcccggcttccctgcttccagcgctgcagccctcagtgggcggccatgtagatgtcctgaagcacggccttttccagttccagctcgcccagcaggttcttcacgatatcgcccaggctgaggatgccgaccagctggttgccgtcggtcaccatcagatgacggcgccgcgagtacgtcatcaacgacatggcctgcttcagcgtcgcgtccggcgcaatgccttccaggccggtggacggcaggctggagatcacccggcggccggcctgcgggccgtcgtcggccagggtacgcacgatgtccttctcggaaatgatgccgaccggggcatcgtccttcatcaccaccagcgcagcgatcctgttcgcgctcatcttgtgggcggcggcaccgatggtgtcttcggcgtcgatggtgatgacagcttctttcttggattgcaggagttcgcggacgttcattcttgtttcctggtgcaggtcactgaagtcaaaaaagtgtgctcttccgatacgccccctccccgggaacagacctttcagcgcacgtctggcgcacccggccgccgcgtggaatggatcggcaggggatgtgctgcaacgcgaacgaggtgggctcaaccgctcaacccggacctcggtcaaatcgattctacgactgcgaccatcggtcactaccggcatcgataggacagttcgtcgtgggaaccaaccgacgatccagagaatggcaccgcggctgaaaccgccgctgaatacagccgatgccgcgcattaaagaatgattgcctgctgccgacggcggacagaacacccggtggctgtcccacttggcatggccaaccacgcaaacgaaaggggccacgcgggcccctttcgcatgcagcattcaacggatccgggagtgttactccaccgtcacgctcttggccaggttgcgcggcttgtccacgtcggtgccgcgtgccagcgcggtgtggtaggccagcagctgcaccggaatggtgtgcacgatcgggctgagcacgccggcatggcgcggcgtgcggatcacgtgcacgccttcggactcattgaagttgctgtcctggtcggcgaacacgaacagctcgccaccacgggcgcgcacttcctgcatgttcgacttcaccttctccagcaggctgtcattgggggcaatcaccaccaccggcatgtcctcgtccaccagcgccagcgggccgtgcttcagctcgcccgccgggtaggcctcggcgtggatgtaggaaatctccttgagcttgagcgagccttccagcgcgatcgggtaatgcaggccacggcccaggaacagcgcattggacttgcgcgcgaagcgctcggcccacgccgcgatctgcggctccaggttcagtgcgtgctgcacgctgcccggcaggaagcgcagctgctccaggtaatccgcttcctgcgccgcgtcgatgcggccatgcagcttgcccagcaccacggtcaactggaacagcgcggccagctgggtggtgaaggccttggtcgaagccacgccgatctccgcgcccgcgcgggtgtagcagaccagctcgctggcgcgcggaatcgcgctttccggcacgttgcagatcgacagcgtgtgcttgtggccaagcgccttggcgtacttcagcgcctccatcgtatccagcgtttcgccggactgggagatggtgacgatcaggtgcttcgggttggcatacgcggcgcggtagcggtactcgctggcaatctccacgctgcacggcaggccggcgatggcctcgatccagtagcgcgcggtcaggccggcgtagtagctggtgccgcaggcaatgatctgcacgccctcgatgcccgacagcaccgcttcggcattcttgccgaacagctcggccgggaaaccaccggcgtcgatcgccgcctcgatggtgtcgcccagcgcgcgcggctgctcgtggatttccttctgcatgaagtggcggtacgggccaagctccagcgatgccagcgacacgtcggacaggtgcacatcgcgctcgaccggccggtcatgctcatcgaagatgcgcacgccatcgcgacggatctcggcggtgtcgccctcttccaggaagatcaccttgcgggtggccgagatcaccgccgagacgtcggaggcgacgaagttctcgccctcgcccaggcccaccagcagcgggcagcccatgcgcgcgcagacgaagcgctccggctcggcgcggctgaccacggccagcgcgtaggcgccggtcagctccttcaccgtgtgctgcagcgccaccagcaggtcatcgccgcccttcaggtgatgatggatcaggtgggcgatgacttcggtgtcggtctgcgactcgaaggtgtagcccagcgcccgcagcttctcgcgctgctcttcgtggttctcgatgatgccgttgtgcaccagcgccacgccgtggctgatgtgcggatgcgcgttggcctcggtgacgccgccgtgggtggcccagcgggtgtggccgatacccagcaccgcattgaacccttcggcctcggccgccgtggccatttccgacacgcgaccggtgcggcggacacgacgtacttcggggcgctcggcgtgatcgatcaccgcgatgcccgaggagtcgtaaccacggtactcaagccgcttcaggccttcgatcagcaccggcaccacgtcgcgatcggcgattgcacccacgattccacacatgtcacgcgtttccttgaagacgatcggcgcattctagcccgcgtgtccggcttccccctcctgtccgcttaatgaaagtgtccggaaaggtgtccgcggacacccggacactcccgcggcccgcccaacctgttgaactgaaaggaaataaagttggcacgctacgtgcttggtactggctaccaccgtcaggcacgcacccgatgatccgcgacacttccgcacaggaccagatcgtttcctccgccccggccggcgccacccgcgccaactggcagcgttaccgctggccggcgctgggcgccatcgtgctgctggccggcatcggctgggccgtgcatgcctggtccaatgccagccgctccttcgacagcagccgggtgcgcatcgccgaagtgaagcgcggcgacctggtccgcgacatcgccgccgacggccgggtgatcgccgccaacagcccgatcctgtacgccatctcggccggcaccgtggacctgaaagtggtcgccggtgacgtggtcaagaagggccaggaactggcggtcatcgacagcccggaactgcgcagcaagctggcccaggaacaggccaccctggccggcctggaagccgaggccagccgtgccgcgctggacgccaccctggcccgcgccaagtcgcgcaaggaaaccgaccaggccaccatcgagcgccaggccgccgaccgcgacctgcagcgcttccagcgcggctacgacggcggtgcggtgccacagatcgacctggccaaggccaaggactcgctgaagaaggccgacatcaccctggccaacgccaccaccgatgcgcgcctgcagagccagggcgccgacctggatgcccgcaacaagcgcctgctggccgaccgccagaaggccgtggtggccgaagtgcagcgccaggtcgacgcactgaccctgcgcgcaccgtttgacggccaggtcggccaggtgcaggcggtccagtccaccaacctggctgccaacgcgccggtgctgggcgtggtcgacctgtccaagttcgaggtcgagatcaaggtgccggagagcttcgcccgcgacctggcgatcggcatgccggcgcagctgaccggcggcaatggcaagccgttcccgggcgagatcagcgcggtgtcgccggaagtggtcaacggcgaggtcaacgcccgcgtgcgcttcgccagcgcgcagccggaaggcctgcgccagagccagcggatgtcggtgcgcgtgctgctcgatacccgcaaggacgtgctgaaggtcgagcgcggcccgttcgtcgaacagggcaatggcgtggcctacgtgatggatggccgcaccgcggtgcggcgtccggtggaactgggcgtcagcagcctgggcgaagtggaaatcaagtcgggtgtgcagccgggcgaccgcatcgtggtctccggcagcgacctgttcaaggacgccgaacgcgtctccgtcaactgatacctgaatcctggagagaggacaccccatgtacatgctcgaaatgcgttcggtcgccaaggtcttccgcaccgaacaggtggaaacccacgcgttgcgctcgctggaactgcaggtcaaggaaggcgagttcgtcgcggtcaccggcccgtccggctccggcaagaccaccttcctcaacatcgccggcctgctggaaaccttcaccagcggcacctacctgcttgacggccaggacgtgagcacgctgggcgatgacgcccgcagccgcctgcgcaaccagaagatcggcttcatcttccagggcttcaacctgattcccgacctgaacctgttcgacaacgtcgacgtgccgctgcgctaccggaagatgagtgccaacgagcgccgcgaacgcatcgagaaggcgctcacccaggtcggcctgggctcacgcatgaagcattacccgaacgaactgtccggcggccagcagcagcgtgcggcgatcgcgcgtgcgctggccggcagcccgcgcctgctgctggccgacgaaccgaccggcaacctggatacgcagatggcccgcggcgtgatggaactgctggaggagatcaatgccgccggcaccaccatcgtgatggtcacccacgacccggaactggccgcgcgcgcgcagcgcaacgtgcacatcgtcgatggccaggtgaccgacctggtgcgcgaaccggtgctggctaccccgccgcgccacatcgttgccgtcaacgagtgagggcactcccatgttcgcctactacacccgattggcggtacgcagcttccgccgcaacaaaatcctgaccgcactgatggtggtcgccatcgcgctcggcatcggtgcctcgatgaccacgctgacggtgttccacgtgctgtccggcgacccgattcccggcaagagcgaccagctgttctacgtgcaggtcgatccgcgcccgcgcggcggctataccccgggtgaggagcctgaggaacagatgacacggcgcgacgccgagaccctgctgcgcgagaagcgcggcatccgccaggcgatgatgagcgcgggcggcggcacggtggaaccggagctcagcacgctcaagccgttctcggtggatacgcgctggacgtcggccgatttcttcccgatgttcgacgtgccgatgcagtacgggcgtgcctggaacagcagcgatgatgacaatcgcagccgggtggtggtgctgtcgaaagcgatcaacgacaagctgttccagggtgccgacagcaccggtcgcgagatccgcctgagtggccattcactgcgggtgatcggcgtgatgaagaagtggaatcccgaaccccacttcttcgatctgaccaccggcaactacggcaaggatgaagacctgctggtgccgttttccactgcgatggacctggagttcggcagcaacggcaacatgaactgcttcggcgagaatccggatggcagcagcaactcgatcaacgcgccctgcagctggatccagtactgggtggagctggatccggccaaggtcgaggactaccgcagctacctggccaactactcggaccagcagcgcgcagcgggccgtttcgagcgccctaccaacgtgcgcctgcgcccggtgatggagtggttgacgttcaagaatgccgtgcccagcgacgtgcgcctgcagatgtggctggcactgggctttctcggcgtctgcctggtcaacacggtgggcctgctgctggcgaagttcctgcgccgcagcggcgagatcggcgtgcgccgcgccctcggtgccagccgtgggcagatcttcctgcaatgcctggttgaagccggtgcgatcggcgttgccggcggcgtgctcggcatcggcctggccctgctcggcctgtatgcggtgcgccagcaacccgtggactacgcgagcctggcccacctggacggcagcatgctgctgctggccattggcctgaccctgttcgccagcctcgccgctggtttcctgcccgcctggcgcgcgatgcaggttaccccggccatccagctcaagtcgcagtaagcacgagtacgaggacctcccatggatatccgccccatcctcagcaccctgcgccggcacaagacagccgccgccctgatcgtgctggaagtcgccctgacctgcgccatcgtctgcaatgccctgttcctggtcacccagcgcgttgaacggatcagccagaccagcggcctggccgagaacgagctggtgttcgtccgggtcagcggcatcggcaagcagaccaatggccaggcccgcacccaggaggacctgtccgccctgcgcgccgttcccggggtcaccgccgccgcgaaggtcaaccagctgccgttccgcccgaactcctccaataccagcgtttcgctgaagcaggaacaggaacgtccgaccgccttcgtcaccatgtacatgttcggcgaaggtggactgtccacgcttggactgcagctgaccgccggccgcgacttccagcccagtgaatacagcaacgtcgaggatgcacagaagaacgcctccaccaataccgcctcctcggtgatcatcagccgcacgctcgccgacaggctgtaccccggcgagaacgcactgggcaagacgttctacatgggcaagcagccactgcacgtggtgggtattgtcgcgtcattggccacgcccaccgattacaacaacaacaccacgctgtcgatggtgctgcctgtgcggaccgatttcacccagggcccgtacgtcctgcgcaccgctccggaacggcgcgaggaagtactcaagggcgcgatcgccgcgcttgaacgcaacgaccccaaccggctggtgcgcgagaagctgacctatgaggcgcagcgcaatgactacttcaagaacgacagggccatggtcgggctgctgatcacggtgtgcatctcgctgctggtggtcaccgcactgggcatcatcggcctggccagcttctgggtgcagcagcgcagcaagcagattggtatccgtcgcgcgctcggcgcgacgcgtgggcagatcctgcgctacttccagaccgagaacttcctgctggccacgctgggcatcgtgctgggcatgctggccgcctatgcgatcaacctggcactgatgaacatgtacgagctgccgcgcatgccgctgcactacctgccgctgggcgcactgctgctgtgggtgcttggccagatcgcggtgttcggaccggcccggcgcgcggcagcggtaccgcctgcggttgccacgcggggcgcatgagatgcgtatccgctggatgctgatgatgatgctcctgccactgccggcactggccggcggtggcagctcgcagacactggagtggcgccaggacgatgcgcgcctggcattgcgttcgagcgaaggccaggtgcgcgtggaagccgccggcccggaagcccgcttcggcgtgcgcagcggcgatcgcatcctgcgggtggatgacaccaccgtacgcaggatcgagcatcttgccgaggccctgcggcgttcaagcgccgccagggcctatctcctgctgcagcgcgacaggcaggaactgacggtcgcggtggacgccgctgcctggcgcagggcgctggtcgctccgcctccgccagcaccgccaccgccgccgccccgacgctgagcccgccgccccgacggctacgggtttggctatgcttgatgggtggcgccgggctctcccggcgtatggacacgaacacggctccatcggcgccgcccatccctttctgcagaaccgcttgatgccttcgatcctgatcatcgacgacaacgccagtgtgggcactgcactggacgtgctgttctccctgcacgacatcgacaccctgcaggcgcagagcccggccgaggggctggccctgctcgagtcgcagccggtcgacctggtgatccaggacatgaacttcagcgaggacaccacctccggcgaggagggcgaagcgctgttcgcacagatccgcgcacgccacccggacctgccggtgatcctgctgaccgcctggacccacctgagcagcgcggtggacctggtcaaggccggcgccgccgactacctggccaagccctgggacgaccgcaagctgctgaccacggtcaacaacctactggagctgtccgaggcgcggcgcgaactggaccgccgccgcagccgcgagctgcgccagcgcaatgcgctggaagaaaagtacgacctgtgcggtgcggtcttcgccgatccggccagcgagcgcgtcatcgccctggcctgccaggtcgcgcgctccgagctgccggtgttgatcaccggtcccaatggtgccggcaaggagaagatcgcgcagatcatccaggccaattcactggtggccaagggcccgttcatcacggtcaactgcggcgcgttgccgtcggagctgatcgaggccgaactgttcggtgccgaggccggcgcctacaccggcgccaacaaggcacgcgagggcaagttcgaagccgccgacggaggcacgctgttcctggatgagatcggcaacctgtcgctgggtgggcagatgaagctgttgcgcgtgctggaaaccggccgcttcgagcgcctgggttccaatcgcgaacgccaggtcaaagtccgcgtggtcagcgcgaccaatgccgacctgccggcgatgatccgcgacggcacgttccgcgaagatctctattaccgcctcaatacagtggaactggtactaccgccgttggccgagcgcgcgggcgacatcgttccactggccgagcgtttcctgacggccggcaagccgctgtccagtgccgccagtgccgccctgcaacggcacccgtggccgggcaacgtgcgcgaactgcgcaacgtgatccagcgtgccgaactgctggcgaccggcaaccgcatcgaggtggccgacctgaacctgccgcgcaccgcaccggcgccacgccccgcaccgagcgctggcaacgatcccgaccgcgagcgcatcgaggacgtgctggcacgcaaccacggcgtcatcgcccaggcggctgccgaactcggcctgagccgccaggccctgtaccggcgcatggaccgccacggcatcccacgcgaatgaaacggcgctcgttcaccttccgcctgttcctgcgcctgctgccggtgctggcgctggccgctgcgctgccgtggctgctggcgtactggatgaaccatggctgggtggtgaccacggcgtcggccgtgatcctgctggcgttgatgtggtggaccctgcgccgtgccaccgcaccggtgcgctcgctgatgcgtgcactgtccggcaccaccagcagctaccgcgacggcgagtacaacttcggcgtgtactggccgggcaacgacgaactgggcgacctggtgcaggcgcaccgcgagctgggcgatgtgctgcgcgaacagcggcagggcctggtgcagcgcgaactgctgctggacaccatggtgcagaacacgccggtggccatgctgctgattgcctccggcggcgatggcatcgcccgcgtggtgttctccaacctggctgcgcgcaagctgctgcatggcggctggaagctggaaggccagcgtctggaagaggtgctggaacaggtgccggtggagctgcgcgatgccattgcccgtggcggcgacagcctgttcgcggtgcatgccgagggcgaggacggcgacgaggatgacgagcaggtctaccacctgtcgcgccgcgccttccagctcaacggccgtccgcacgacctgctgctggtacgcctgctcaccgccgaactgcgccgccaggaagtgcagacgtggaagaaggtgatccgggtgatcagccacgagctcaacaactcactggcaccgatcgcctcgctggcccactccggtggcgtgctggtgcagcgcgaacgcttcgaccggttgccggagatcttcaccaccatcgaggaccgcgcacgccacctggaaggcttcatccgtggctatgcacgcttcgcaaagctgccgcagccgcaactgcagaccgtgcactgggcgccgttcctgtccagcctgcgccagcagatcccgttcaccatggaacgcgagccggacgaggacctgagcagccgcatcgacatcgcgcagttcgggcaggcattgctgaatcttctgaagaacgcgcatgaagcctgcgccgaggccgatccgcccaacgatgacgtacaggtgcaactcacgcggctgccgcaatggctgcgcctggacgtactggatcgcggcaagggcatgaacgagcaggtgctgcagaacgccttgatgccgttctattcgaccaagcgcaacggcaccggcctggggttggcactgacgcgcgagatcgtggaagcgcacggtggccgcgtgtcgctgcagaaccgcggcgatggcgggttgtgcgtgtcgatcctgttgccggtgggttgagcgggccgatcgggtagctccacgccatgcgcggatgtgccgaccagggccggcacctaccaggtccgccgcatcgccacccgcaggtgcatcggaaacccgagcgcagcctcttcggccatgacggcgcgcaggccgtcgttccactcagcctcaggcactacgtcgaacccttcgctggcatagaaggctgcattccatggcacatcgctcaaggtggtcagcaccgctgcagcaaagccggtggccctggcctgcgccaaggcgtgccgcagcaatgcacggccatggccacgacgcgcgtgcgccgggtccacatccatctgcaggacatggaactcgccacccagctcgccgcccagcaggtagccggcaatgtcgccgccggggccatccacaacccacagctggccccgctgaaggccgtcctgcagcgtcggcagatccaggccgtggccggcaaataccggatgggcttcgtgatccttcagcagttcgccggcacgctgttcaattgccggcagcacgccgagctcgtcggcatgcggaatacgtggctcaggacttcttgaccgggcgcttccagccatcgatggtttcctgtcgtgcgcgggccagtgtcagcttgccgtccggggcggtgcgggtgatgaccgaaccggcagcgatggtcgcgccctcgccgatcgtcagcggcgccaccagcgaactgttggaaccgatgaacgcgttgtcgccgatggtggtggtcgacttgttcacgccgtcgtagttgcaggtgatggtgccggcaccgatgttcaccttgctgccgatcaccgcatcacccagataggtgaggtggttggccttgctgccgacgccgagggtgaccttcttggtttcgacgaagttgccgacgtgcacgccatcggccagcacggtacctgggcggaggcgcgcgaacggaccgaccagcgccgcgccttcggtgaccacaccctccagatcacagtgcgcgcgtacttcggtaccggggccgagagtaacgtccttcaggcggttgaacggaccgatggtaacgccgtcgccgagcacgatgttgccttcgagaacgacatcgacatcgatcagcacgtcactgcccacggtgacggtgccacggatgtcgagtcgtgccgggtcgcgcacgcgtgcaccctgtgcgcacagcgcacgcacggcgcgatgctgccaggcacgctccagctgcgacagctgccagggatcgtttgccccctcggcttcctgcgcgtcggccaccagcgccatttcggccggggtgtactcatgcgcggcaaatgcgaacacgtcggtcaggtagtactcgccctgcgcattgcggttggacagctgcgacagccagcggcgcagcgcggtcgactccgcggcgatgatgccggtgttgatcgtgcgcacgcgcagctggtcgtcggtcgcgtccttctgctcgacgatcgctcccaccttgccttcggcatcgcgcagcacgcggccgtaaccggtcgggtcatcaacctcggcgaccagcaccgccaaccgccccggctgcgccagcagatcgcgcagggtctgcgcgcggatcagcggtacatcgccgtacagcaccagcacctgcacggcatccggcacctgcggcatcgcctgcgccaccgcgtggcccgtacccagctgctgcgcctgttcagcccactgcaggtcgggctggtcggcgaactgttgccgcaccgcctcaccgccatggccgtagaccacatggatggccgccggttgcagttcgcgggccgcatcgatcacgtgcgccagcatcggttggccggcgatcggctgcagcaccttcggcagcaccgacctcatgcgcttgccggcgccggcggcgaggatgatgacgtgcagggcttgggtcatgggaacggcagtccgtggttcggtgccgacgattctagagcgtacgccgttaacatgggcatccctcctccttcaccatgccgatgagccttgtccgccagggaagcgcctacctcgtgatcgggctcgtgcagctgctggtcgattggctggtgttcgtggtcgccaccgcgcttggcatgccggtcgcaccggccaacgtcgccgggcgcctggccggcatgctgctgggcttctggctcaacggccgctacacctttgccgaggccggcacccacaagctgggctggaagcgctttgcacgcttcttcgggctgtggctgctgctgactgcggcaagcacgttgctggtgagcctggtcgaccacgcgctgggcctgcagtacacctggctggccaagccactggtggaaggcgggctggcgtgcgtgtcgttcctgttgatgcgctacgtggtgtaccgctgatcgcggtcagcggtcagcggtcagcggtcagcgatcagcgatcagcgatcaccgtcacggcgcaggcgcgctcccagtccctcacgccacagctgcagcgcgctgtagcgcaaccgcacctgatgctgcccggccggcacgcacaacgcatggaagaggccattgccgcgcagcagcggcagtacctggccatcctcgagctgcgcctgccagccacgaccggtggtttcgttgatcaccacccatgctgcatggtcggccaccaccgtcagctcgatgcgtccaggctggtagcgcagcacctgtaccgtggcctcgccggcatcctgttcggcacagtggctgctggcggctgccggcagccatagctgccggttgaaatcggtctggttgaacagcggcgcaggcggtagacgctcctcatggcggcgcacctgccgcggattcagcacccgtggcagcacgctgtcacgccgcgcaagttccacctggtcgccctgcgcgctggagcccgggaacggctcctgggccagcagccaacgcacgcccagcaggtcgtacaggggagcagcggtgtctggcatccaggcagtggggaccttctgctggaaggtatccaccggctcgcccggcatcccggtcatctgcagatagtcgcttgccagcagcgggttgtagccgtttgccagcgcaatggcatgcaccgccgcgccgttggtgagtccgccgatgccgaagaccaccgcgcgctcgggtatgccgatatgccgctctgccgccagcagcgcataggcgcgctgcgcaggacccgcacgatcggcggtgagcaccgactttgtgccgctgcccgcgttgaacctggtgccgacgttgaacaacagcaggtccaacagcaccagcgccagcacccagcgcgcaggtgactggtggcggcgcagcacccacaccgcggctacgcccagcgcggcgctgaccgcaagccaggcgaaagcgagcggatgaccatgatcgatcgccagccacgcagcgcacgcgcccagcactgcgacgaccgccacggacacccgatgcaatcgcaatggctgccgctgcagggcaacctgcagggcactggcacccagccacgccgccgcaggcacggtaaggaacagcgcatcggacgggcgccggaacaggtccagccccggaagccagccaaacaaccaggggaacagcggcgtggcgccacccaccgcgaccatgatcgccagcgtcagcgcacacagcgcgacgcgcgtcgccgccggcttgcgccgcagcacctcaccgccccagagcagccacagcgccagcggcactgcccccacatagaggtaatcggcgctgatatcaccgaaggcccagctgtcgccgcgcccctgcgagaacacgttgcccgacagcagtgtcaccagtgtctgccagtggatggcacccggcagcgcggcttccagcgtcaggccattgcgattggtctggtccagccaggccagcgtggacagccactgcggcgcactgacaccaccggcgagaatggccaccacgcccagctgccacagcaggcgcatgcgctgcccctgtgccagcacgacagcagccacggcgtagatcacgcacgcgaggatgatgaaataggtgacctgggtcagttgaagcgcacacatcccgccggccacaccggccagcaggatgtcgcgcatccgtccccgccggcggacctgctccaggcccagccacagccagggcagcaggcagtagctgatgatcatcggcgtgtgctgcaggcgcgacgcggccacgccaccaaacatcagcgtgagtgcaaacagcagctgcgccggcggcggcatgccctgcacgcggctcaaccgcagtgcacccaggccgcctgccagcacatgcagcagcaccaccaccgtgaacaggtgcagggagcccggcgccagcagcatcggcagcagcatcgtcggctgcagcgtcatcatctgcggatcggccacctgcgggtagccaccgtagagatacggattccaccagggggcctgcaggtgacgcaactgctcggcactgaaactgaccgccgggaagaactgctgcacggcatcaaagggaatggtcttgatgccactgagccatggcaggcacagaaccatccacgcaatcaggaacacgcctgccggtgtgcgccacggccgctgccagctgccgccttcaatcgctgtcgagtggtgctgcattccctgctcctgtggcgaacaaacaaaaacgccggcagctagccggcgcttgtgcttgatgacgcgcgaacctcagtgcttgagattcttgcgcaggcgctccagcgcctgcagctggacgacggcttcggccagcttctgctgggcttcagccacttccatcgcttcgccgcggttggccaggatgcgctcggcttcttccttggccttgcggaccgaggcttcgtcgatgtcctgcgcgcggatcgcggtgtcggccagcacggtcaccacctgcggctgcacttccaggatgccgccggaaatggcgaaatccagctgctcgccgttcggcgtggtcaccaccaccttgcccggcttcaggcgggtgatcagcggcgcgtgcttgggcgcgatgcccagttcgcccagctcaccggtggccacgaccagggtcgcttcgccacggaagatttcctgctcggcgctgacgatgtcgcaacggatcgtgctcatgcaaatctcttcgctgttcgcggcggcgcaatgccaccgtgggggtccaccggcgcgggcggttgcccggcgccggcgtcaggtcgggcaggatcgctcccgcccgtcccggatcaggccttctcggccatcttcttggccttctcgaccgcttcttcgatgccgccgaccatgtagaacgcctgctccggcaggtggtcgtactcgccatcgacgatggccttgaagccacggatggtgtccttcagcggcacgtacttgcccggcgaaccggtgaacacttcggccacgtggaacggctggctgaagaagcgctcgatcttgcgggcgcgcgacacggcctgcttgtcttcttcggacagttcgtccatgcccaggatggcgatgatgtccttcagttccttgtacttctgcagggtctgctggacgcgctgggcggtgtcgtagtgctcgtggccgatgaccagcggatccatctggcggctggtggagtccagcggatcgacggccgggtagatacccagcgaggcgatcgaacgcgacagggtcacggtcgagtccaggtgggcgaaggtggtcgccggcgacgggtcggtcaggtcgtccgcgggaacgtagacggcctggatcgaggtgatcgaaccgttcttggtcgaggtgatgcgctcctgcaggacgcccatttcctcggccagggtcggctggtaacccacggcggacggcatgcggcccagcagtgccgacacttcggtaccggccagggtgtaacggtagatgttgtcgacgaacagcaggacgtccttacccttgccgttttcgtccttctcgtcgcggaagtactcggccatggtcaggccggtcagggcgacgcgcagacggttgcccggcggctcgttcatctggccgtacaccatcgccaccttgtccaggacgttggagtccttcatttcgtggtagaagtcgttgccctcacgggtacgctcacccacgccggcgaacacggacagaccgctgtgcgccttggcgatgttgttgatcagttccatcatgttgacggtcttgccgacgccggcgccgccgaacaggccgaccttgccgcccttggcgaacgggcacatcaggtcgatgaccttgatgccggtttccagcagctcggtggccggggactggtcttcatacgacggcgcagcgcggtggatttcccagttgtcgctggcagcgaccgggccggcttcgtcgatcggacggccaagcacgtccatgatgcggcccagggtgccggcgccgaccggcaccgagatgccacggccggtgttgacggcaaccaggttgcgcttcaggccgtcggtggaaccgagggcgatggtacgcaccacgccgtcgcccagctgctgctggacttcgagggtgatctcggtgttttccaccttcagtgcgtcgtacaccttcggcaccgattcacgcgggaattcgacgtcgacgaccgcgccgatgatctgaacgatcttgccctgactcattgctgcatcctctaatgtgtgctttgaacgaacgcggtcagactgctgccgcgccgccgacgatttcggagatttcctgggtgatcgctgcctggcgcgccttgttgtagacgagctgcagggtgccgatcagcttgttggcgttgtcgctcgccgccttcatcgcaaccatgcgtgccgcatgctcggaggcgacgttttccagcagtgcctggtacaccagcgactcgatgtaacgcgtcatcacgtgctcgagcacggtcgcggcatcgggttcgtacaggtaatcccagtcgtggtgagcgacctgcttctcagccggcggcagcggcagcagctgatcgaagctggccttctgcaccatggtgttcacgaagcggttgtagaccaggtacacgcggtcgatcctgccttcggtgaaggcgtcgagcatgaccttgatcacaccgatcagcgattccagcttcggcacgtcaccgatgtgggtcacgctgccgaccatgttgaccttcacgcggcggaagaaggtcgaagccttctggccgatggtcaccaggtccacttcggcacccttgtcctgccatgccttggcttcgcccagcatcttgcggaacaggttgttgttcaggccgccggccagaccgcgatcggaggagatcacgatgaaaccgacccgcttgacctgctcgcgctcgaccaggaacggatgctggtagtcggtgctggcctgggccagatgaccgatcacctgcttcatcgcctgcgcgtacggacgcgaggtcttcatccgatcctgcgccttgcggatcttggaggccgagaccatttccagggcgcgcgtcaccttgcgggtgttctgcacgctcttgatcttggttttgatttcgcgtccgcttgccatctcttgtttcccgtggcgcggggctgatgccccgcgttgttcaaccgtttgtcatctggtccagcggagccagcggctccgctctacaggaccgcgattaccagctgccggtggtcttgaactcggcgatgcccttcttgaaggcaccttcgatgtcgttgtcccaaccgccggtggcgttgaccttgctgatcagctcgccctgggtgttggcgaagtgggcgtgcaggccttcttcgaacgccagcagcttgttgaccggcacgtcgtcgaggtaaccctcgttgacggcgtagatcgacagcgcctggttggcgatcgacatcggcgcgtactgcttctgcttcatcagctcggtgacgcgctggccacgctccagctgcttgcgggtcgcttcgtccaggtccgaggcgaactgcgcgaacgcagccagctcacggtactgggccagcgagatgcggatgccgcccgacagcttcttgatgatcttggtctgggccgagccaccgacgcgcgacaccgagataccggcgttcacggccgggcggatgccggcgttgaacaggtcggtttccaggaagatctggccgtcggtgatcgagatcacgttggtcggaacgaaggcggacacgtcgccggcctgggtctcgatgatcggcagcgcggtcagcgaaccggtcttgccggtgaccttgccttcggtgaacttctcgacgtattcctcggacacgcgggcagcgcgctcgagcagacgggagtgcaggtagaacacgtcacccgggtaggcttcacggcccggcggacgcttcagcagcagcgagatctggcggtaggcaacggcctgcttggacagatcgtcgtacacgatcagcgcgtcttcgccgcggtccatgaagtactcacccatggtgcagcccgagtaggcgctgatgtactgcatggcagccgattcggaagcggtcgcggccaccacgatggtgtgggccagcgcgccgttctcttccagcttgcgcacgatgttggcgatggtcgacgccttctggccgatcgcaacgtacacgcacttgatgccggtgcccttctggttgatcaccgcatcgatcgccatggcggtcttgccggtctggcggtcaccgatgatcagctcgcgctggccacggccgatcgggatcatcgagtcgaccgacttgtaaccggtctgcaccggctggtcgaccgacttgcgccagatcacgcccggagcaacgcgttccaccggagcggtcaggtcggtgcccagcgggcccttgccgtcgatcggctcgcccagcgcgttcacgacgcggcccagcagttccgggccgaccggcacttccaggatgcggccggtggtcttggcgacgtcgccttcgcgcaggtgctcgtagtcacccaggaccacggcgccgaccgagtcgcgctccaggttcagggccagggcgaaggtgttgttcggcagttcgatcatttcgccctgcatcacgtcggccagaccgaagatgcgcacgatgccgtcggacacgctggtcacggtgccttcgttgcgcgattccgcggccagcttgaccttctcgatgcggttcttgatcagttcgctgatttcggaggggttgagcgtggttgccatcgtcaagtcctagtgccggcagcggggccggacgttaaatgaattcagttagcgagcgcggtctgcagacgggccagcttgcccttcagcgaaccatcgatgaccacgtcgccggcgtcgatcacggcgccgccgatcagcgaagcatcgaccgcggtggtcacgtcgacctcgcggttgaagcgcttgcgcagcgcagccttgatcgcgtccagctcgccggccgacagctcggaagccgaggtcaccgtggccttgaccacgtgctcggcttcggcgcgcagggcgtcgaacatgccggagatttccggcagcagcggcagacgatgcgattcggccaggatggccaggaagcgcgagtaggtctcgccgtgcgacaccggcgccagcagggcgacggcgtcgtcacgacccagctccgggttggcgagcagggccgccacgcgcgggtcggcggcgacgtgggcggagaacgccagggcgtccgaccacggcgcgaacgcaccttcgtcgcgcgcggtcgcgaacgcggcgcgggcgtacgggcgggcaagcgtgagggcctggctcatccttagatctccgaggccagctcgtcgagcagcgccttgtgggcgttggcgtcgatttcgcgcttgagcagcttttcggcaccggtcacggccagcgcggacacctgcttgcgcagatcttcacgggcacggttggcggcggcgtcgatttcagcctgggccagttccttctgacgggtggcttcggtgatcgcttcgttacgggctgcatcaacgatctggttggcacgcgcgtgggcctgatcgatgatctcgttggccttggtgcgggcttccttcagcgcttcgttgaccttctcctgcgcctgggccagatctttctggctgcggtcggcagcagcgaggccttcagcaatcttctgctggcgctcttcgatcgcgttcatcagcggcggccagatcttggtcgcgatgatccagatcagaccagcgaaggccagcgcctgcgcaagaagggtgaaattgatattcatggttagctcgatcgctggtttcggggtggacgtgccgccgaagcggcacatccggccttcatccgaaaccgggtgcatcagcacccggtcgtctcaaaccgctgtatcagccggccagagccttggtgacggcgccagcaaaggcagccgacagcgggttggcgaaggccagcagcaggccaacggcgaccgagatgatgaacgcggcgtcgatcaggccggcggtgatgaacatgcggacctgcaggaccgggatcagttccggctggcgcgcggccgactccaggaacttaccagccatgatggccagacccagaccggcgcccagcgcggccaggccgatcatgatgccgacggcaagggcggtggagctctgaatctgcgcgaagttggtcaggacggcgaagtacatggttatctccaggaacttaagttgctaagggtgatgaaacggatgaaggttgaaacgcgttgaagcttgaaactcagtgagcgtcttccgacaggctcaggtacacgatcgacagcatcatgaagatgaaggcctgcagcgggatcaccagcaggtggaacagcatccagccgaggccgaacacaccacccgcgatggcgccgaagaaaccggcaccacccagcacccagatcagcaggaacacgatttcgccgccgaacatgttgccgaacagtcgcatcgccagcgagatcggcttgctcagccactcgacgatgttgaggatcaggttgaacggcatcatccacttgccgaacggcgccgtcaggaattccttgacgaagccgaccaggcccttggacttgagcgcgaagaacagcatcaggaagaacacgctgatggccatgccgagggtggcattgacgtcagcggtcggcaccggcttccagtagtgcacgcccacccattccagcggcttggcgatgaaatcggccgggatcatcttcagcagattcatcaacaggatccagaagaagatcgtgatggcgatcggcgtgaccagcttgctcttgccgtggtaggtgtccttggcctggcggtcgacgaactccaggcagatctcgacgaaggcctgccacttgcccggcacgccggcggtggccttgcgggtccccagccagaacgcgacaacgatcaccaggcccatcaggacggcggtgaggaaggtatcgacgtggatatgccagaacataccctcacccttgccgaccggtgcggtcaggttgtgcaggtgatgctggatgtagctggtaggggttagagcctcgcccgccatgtgtccggaaccttcagttaattgaattctgtcaacgcctggccatggccaggacctggaacatcaagccgacggcgataccggccaacagcgccaatgcaggcagcttgaagaccaggaaccccaccagcaggacgccgaaaaccacgacccacttggccacgatcgcaatgatcaggcgagccatcgccgatcctgcggccaccgcaccaccgcccagagccatccgtgccgcaacccagccgccggccgaaatggccacaccggacgccagcgcgccgagggcatacttcggacctaccagcaggaaggccagggccaggacagccaccgcggccagcgggtagaccgcggcgcgcagcatcagtcgccgacccgcatcaacggagttcagcacaggacgtcccgcgtggttgcaagtggagggctgaggcggctacagcaggggggcctcatcgagccgccaaattatagcaatgggacaatttgcgagacaaccgctgcctgttcatccctggaagccgcaagttgcggtaacggttacatttttgcgtgccacccggggacaatgacgtccgcgtgatgctgcaccgcagtattgaactttggtcgcaggcgcggaactttcgccggatgcgccggtccgatctttcgacctgcctgcagcaacctcgtcgacgctccgccccgcaggtcccacgatggccccgaagcccggctccggggccatctttttgcgtcgtcgcgacagggctgaaccgtgcacactccgtggaccatacgttcacggatggtggacggcggcgtccggcacagtggtcttcattctgatgaaccactgcaaggactcttcgatgcgccccgtacccaccctgctcgccctttccctgctcgctgccggcgcctcgttcgccaattccgcccacgccgccgaaggcgacgaccgcttcgccatccgtctgggtgcgatgaacatcgattcggacaacacgctgcgcggcagcaccaccgtggccggccaggacatctccctggaccaggacttcaagctgggtggcaaggaatgggagccgcgcatcgacggcatgttccgcatcagcaaccgtcagcgcctgctgttcaactacttcaagtacgacaaggaccgtcgcgagacgcttgaccagggcatttccttcggcggtgagagcgtgccggccggcagcttcgttaagggcgagctgaagtaccaggtggccagcctggtctatgactactcggtcgtcgataccgacaccttcgacctgggcctgcagatcggtggcgagtacgccaaggtcagcaccaagggctacgcggacctgggcacggtgtatgaaggccagttcctcaacgagaaggccgatggcgtggcaccggtggtgggtgcgcgcatgaccttcactccgtccgagcgctggatgatcacgctgcagggccagtacctgaacacgcgctggggcagtttcgatgactacaagggcgacctgagccgcgccaatgcgatcgtcgattaccgcttcaccaagaacttcggtgtgttcgccggctacgactggttcaagctggacgtggacaagaagggcagcgacggcacggtcggcctgaagcaggaattcaagggcccggtggccggtatcagcttcgtgttctgatcccctgccccttccacggcatcttctctcctggcgcggcctccggaacatcggggccgcgttttttctttgcatcgtcgagcagaaaagcaggctggtcgagcgctgggggaagaggggcttgcgtgcgaatgtcccccggcgccggcctacggccgtcacctcctcctttacttcgcacacaagcccctcttcgtgtcaggcatccaggcgggccaggctgtggctctcgactatccgcaagccgagccgctgcgcgggtggcaggcgtttggacaaagtagaggaggaggcgaccgccaaaggcggacgacgggggacatttgtccagacgcctgccacccgcgcaccggcccagaccttcgcggtggcagttgccgtagacgcaggcgtggtcgagcgctgggggaagaggggcttgcgtgcgaatgtcccccggcgccggcctacggccggcgcctcctcctttacttcgcacacaagcccctcttccctcgcgtgtcaggcatccaggcgggccaggctgtggctctcgactatccgcaagccgagccgctgcgcgggtggcaggcgtttggacaaagtaaaggaggaggcgaccgccgaaggcggacgacgggggacatttatccagacgcctgccacccgcacagcggcccagaccttcgcggtggcagttgccgtagacgcaggcgtggtcgagcgccggagggagagggcatccgggcggctttggcactgctctcgaccgtccgcaagccgagccgctgcgcgggtggcgggcatttcgacaaagtaaaggaggaggcgaccgccgcaggcggacgacgggggacatttgtcgaaatgcctgccacccgtgcagtggccccaccctttgctgcagcactgatcgaagaaaaaaagccccggcagatgccagggcttttcgttcggaacggcgcggacgccttacttcttcttcggcatgtacagatcggtgatcgtgccgtcgtagatttccgaggccatcgccaccgactcgctcagcgtcggatgcgcatggatggtgtggccgatgtcttccgcttccgcccccatctcgatcgccaggccgatctcggccagcaggtcgccggcatgcacgccgacgatcgcgccaccgatgatgcggtgggtctcttcgtcgaagatcagcttggtgaagccctcggtgcgaccgatgccgatcgcgcggccactggcggcccacgggaacttggccacgccgaccttcaggcccttggccttggcttcggtctcggtcacgccgacccaggcgatttccgggttggtgtaggccaccgacggaatcacgcgggcgacccactccttcttgtggccggctgccacttcagcggccagcttgccctcgtgcgtggccttgtgggccagcatcgggttgccgacgatgtcgccgatggcaaagatgtgcggcacgttggtacgcatctgccgatcgaccgggatgaagccgcggtcggtgacctgcacgccggccttctcggcatcgatcttcttgccgttcggcgagcggcccacggccaccagcacgcggtcgaaggtgccctgcgccagcgcaggcgcctggccttcctcggcggcttcgaaggtcacggtgatgcccttggcatcggcggtgacgcccgaggccttggtcttcaggtgcacgtcgatgccctgcttcttcaggcggtcggccagcggcttgaccaggtccttgtcggcgcccggcatcagctggtccatgaactcgaccacggtgaccttgctgcccagcgcgctgtacacggtggccatttccaggccgatgatgccgccgccgacgaccagcagcgagcccggcacttcggccagctccagcgcatcggtggaatccatcacgcgcttgtcgtcccacgggaagttcggcagcttcaccgcctgcgaaccggcggcgatgatgcacttctggaagcgcagcagctgggtgctgccgtcagccgcggtgatttccagctcgttggccgaaacaaacctgccgacgccctgcacgttgcggaccttgcgctgcttggccatgccggccaggcccttggtcagctggttgacgaccttttccttgtacgcgcgcagcttgtccagggtgatggtcggcttgccgaactcgacgccgaaatcaccggcgtgggcaacctcgtcgatgaccgctgcggcgtgcagcagcgccttggacggaatgcagcccacgttgaggcagacgccgccgaggctggcgtaacgttcgaccagcaccgtatccaggccgacgtcggcggcgcggaacgcagccgtgtagccgcccgggcccgagcccagcacgaccatttcgcactcgatatcggccggcttgccactggacagcgccggcttcggcgcagccggttcggccggggcgcggtgcgacggggtcaccggcggcttgctggccggggcggccggagccggcgcggcggccttggccggggcttcggcggcgccttcagcgtccagcaccacgaccacggcgccttcggacagggtatcgcccagcttgaccttgatttccttgaccacgccggcggccgaggacggcacttccagggtggccttgtccgactccagggttaccagaccctggtccttcttcaccgtgtcgccgacggcgaccaacacttcgatcaccggcacatcgctgtaatcgccgatgtcgggaaccttgacttcaatcgtggccatggtgggttttcctcgtgcccgcccggcggcgccggcgggctgtcactgcatctgttcacgcggccgcgccaggggctgcggccgcacggtgggggcgaagcggtgccttacagcagcacgcggcgcatgtcggccagtacctgcgacaggtacgtggtgaagcgtgcggccagtgcgccgtcgatgacgcggtggtcgtagctcagcgacagcggcagcatcagcttcggtgcgaattccttgccgttccagaccggctggatggacgacttggagacgccgaggatggccacttccggtgcgttgacgatcggggtgaacgcggtgccgccgatgccgcccaacgagctgatcgagaagcagccgccgctcatgtccgccgggcccagcttgccgtcgcgtgccttcttggccagttcgccggtttcctgcgcgatctgcaccacgcccttcttgtccacgtcgcggatgaccggcacgaccaggccgttcggcgtgtcggcggcgaaaccgatgtggaagtacttcttcagggtcaggttttcaccgctggcatcgagcgaggcgttgaattccgggaacttcttcagcgctgcggcgctggccttgatcaggaaggcgagcatggtcagcttgatgccggccttctcgttctccttgttcaacgccacgcgcaggccttccaggtcggtgatgtcggcctgctcgaactgggtgacgtgcgggatcatggcccagttgcgggccaggttcgcaccggagatcttcttgatgcgcgacagcggctggacttcggtctcgccgaacttgctgaagtcgaccttcggccacggcagcaggttcaggccaccaccagcggcgacggcgccaccggcagcggccggcacgccaccgctgagcgcggccttgacgaacttctgtacgtcacccttggtgatgcggccccccttctcggtgccgttgatctgcagcaggtccacgcccagctcgcgggcgaacacgcgcaccgccggggtggcgtacggcaccttggccggcaacacgccatcggcattgaactgcaccggcgggctggacggggtaccggccgaggcgatctcgcgggccgccagcttgtccggctgcgccggcacagcgaccggctcgaccttggtggcggtctctgcggcagccggagcggcagctgcagcggccttggtcggcgccggcgcgccagcaccctcggcttcgatgatggcaaccacgtcgccttgcgacagattgtcgcccaccttgaccttgatctccttgaccacgccggccacagacgacggcacttccatggtggccttgtcgctttccagcgtgaccaggccctggtccttcttgaccgtatcgcccacggcgaccagcacttcgatgaccggaatgccggcgtagtcgccgatgtccggcaccagggcttcaaccgcaccaccgctggcagccggagcggccggcagtctcagggcgcgctctgggtggcggcagccggggcagcggccttggccggtgccggtgccggtgccggtgcggcagcggccggcttggcggcttcggcttcgccttcggccacttcgatcagggccacgaccttgccttcggacaggctgtcgcccactttgaccttgagctccttgaccacgcccgccaccgaggacggcacttccatggtcgccttgtcgctttccagcgtcaccaggccctggtccttcttgaccgtgtcgccgacggcgacaagcacctcgattaccgggatatcgctgtagtcaccgatatcggggacaagtgcttccttgatttcggccatggggataactccggcaatctggtgtagggaaacgtctattgtgcggccagcggggtccagcgccaaccgttacaggtgttttcagtacgcacgcagccgggacaggctgttgcccatgggtcgggtgcgcgaccagtcggtagcgtattgtccaggcgatgtccgcttcatgtcgcccgcgcgtcggccaccggctgccaggcctggcgcaggcgcggcaacgaccacgccgcattggcagggctggtcgacggcagcgcgaccaccttcggcggggcctccagccgcggcaacacccagcgctggaatgcctgcaatgacgcgccgccattgcagccgatcagcgtcagctcaggcaacgtggcgatcagttccggcagtgcattggccacttccgtgccatgcacgatgtccgcatccaggctgccgcgccgctcgcagcgcccgatcacatcccacaggccgatgcctgcggcgttcaacgcctgcagccgttgcgcatagggcagatccgcgtcgaaaccgcagatatcggccatcagcggccagaagcggttgcgaggatgcgcgtagtagcgctgctcctgcagggatgccacgcctggcatcgagcccagcagcagcacccggcatcccacgttcacctgcgctggcaggccaatgcacaacgttgctgcgctcacatcttctccaactgcatgaatgtcggcgagagcagaaaacgccatgaataaaggcattccgcacccgtcgctgaacaaggaaaactattttttaacgtgcgtcggattcgattcatgttggggcgactacggtgtgctcgccccgcaaccgggggcccaaaacaagaaacattaggagatacccccatgcgctccatccgtatcctgagtctcgccctgctgacctccgccgccttcgcgccggccgctttcgcccaggacagcagcaccaccgataccgcttcgggcaagcattttgccgttgttggcggcatctcgctgctggagccgaagaacgacccgatcaccggcgtgaagaagaccgacggtggcccggcgccgaccgtcagcttcagctactacatcaacgacaactgggccgttgagctgtggggcgctgccgacaagttcgacaacaagttcaagggcccgaacaacgcccgcctgggttcggtcgagcagcagccggtcgcgctgagcggccagtaccacttcggccaggctgacaacgtgttccgcccgttcgtgggcgtgggctactaccagtcgagcttcagcaacgagaagctgggcaacggcgctgacaccgacatccgcttcaaggatgccaagggcgtgatcggcaccgtcggcgtcgacatgaacatcaactccacctggttcgcccgcgctgacgcccgctacatgcgcgcccgcccggacatcaaggtcggcggcgagaagatcggcgaagccaagatggatccgtggaccgtcggcttcggcatcggcgcccgcttctgatccaggcagcacctgcttcactgatgcaacgcgacgggcccttcggggcccgtcgtcgtttccgtcacccgcgttccgcgtgtagagccgagcccatgctcggctgcttttttgtagagtcgagccaagccccctatcccgagtcgagcggcgggctccgcgcgcattgcgatgctttacgttcaatggcgcccacggtcaagggtggcgcggctcggctctacaggcacaggacgcggagacacgatggacgacgtcgacctgctggtgatcggtggcggcatcaatggcgccggcatcgcccgtgacgccagcggtcgcggcctgcgcgcgctgctgtgcgaacagcatgacctggccgcgcacacctccagcgccagcagcaagctgatccacggcggcctgcgctacctggagcagggcgagttcgggctggtgcgcaaggcgctgggcgaacgcgaggtggtgcgccggcaggcgccccatctggtccatccgctgcgcttcgtcctgccgtgggaaccgcacctgcgcccacgctggatgctgcgcgcggggctgtggctgtacgaccatctgggccggcgcagccccgccttccccgcgtcacgcgcactggaactgcagcacgatccgctcggccagtggctctccccggcgctgcggcaggccttcagctacgccgatgcgcaggtcgatgacgcgcggctggtactgctcaacgccctggatgccgcgcagcggggcgcacaagtgcaggtgcgcagccgctgcatcgacctgcaccccgtgcagggccggtggcgggccgttctggaatccgccgatggccagcggcaccccgtgaatgcccgcgccgtggtcaatgcggcgggcccgtgggccgggggcctgctggaacggatgcagacgcgcagcggcgcccctgcgctgcgcctggtgcagggcagccacatcgtgctgcgcaggccctggcccgatgacagcgcctgcctgctgcagcagcccgacgggcgggtggtgttcctgctgcctttctcccacgaccacctgctggtgggcaccaccgataccgactatcgcggtgacccggcgcgctgcagcgtgctgccttccgaggtgacctacctgtgcgaagcggccaatcgctacctgcgtgaccccatcgccccggacgaggtggtctgggcgttcgccggtgtccgtccattgctggccgacccggatccgcgcgcagcgcagctgagccgcgactaccgcctgcaggtgcaggtggacccggcaccggcgctgcatgtactgggcggcaagctgaccacctaccgggtgctggccgaggaggcactggacctgctgcgccctgccctgccacagatgggaccggcctggacggcgcgcggagacccgctgccgggcagcgactggggcgacgccgcacaggcgtgctcgcgcctgctggcgctggcaccgtggttgcccgcaggtatcgcgcgacgctgggccggggcctatggcagtcgcagcgcggaactgctgcagggtgtacacggcctgcacgatctgggcgaggacttcggcggtggcctgcatgcacgcgaggtggacttcctgcgcgaacgcgagtgggcgtgtgacaccgacgatatcctgtggcgccggagcaagctggggttgcgcctggatgctgcgcaggtggcacggctgcaggcatggatggagggtcggatccctttcccacggaaagggctctgacccccgtgatgccacgtgtgccaacccaggttggcagctaccagggcagccgcgcgcgaagcgatcgatgcattaggatttccccatcgccattggagacgctgcatgacgccccgctacgtgctggccatcgaccagggcaccaccagctcgcgcgcgatcctgttcgaccgcgccggcgatatcgtcggcagcgcgcagcgcgagttcgcgcagatcttcccgcagcccggctgggtcgagcatgacccccgtgagatccttaccagcgtctatgccacattgaccgaactgctcagccgcgggcagatcgacccacgccatatcgccgcgctgggcatcaccaaccagcgcgaaaccaccgtggtctgggaccgtgccaccggccagccgatccacaacgccatcgtctggcaatcgcggcagagccacgccatctgcgagcggctgaaatcggaggggcatgaagcactgatccgcgagcggaccgggctgctgatcgacgcctatttctccgcgaccaaggtgcgctggatcctcgaccacgtggatggtgcgcagcagcgcgccgaacgtggtgagctgctgttcggcaccatcgacagctggctggtgtggaacctcagcggtggccaggcacatgtgactgactacagcaatgcggcacgcacgctgctgttcaacatccacacgctggactgggatgacgacctgctggccctgctcgacattccgcgcgcgatgctgccgcaggtgcgcgactccagcgcggtgtacgcacacacccggccgcagttcttcttcgaccacccgatccccatcgccggcatcgccggtgaccagcaggcggcgctgttcggccaggcttgtttccagccgggcatggtcaagaacacctatggcaccggttgcttcatgttgatgcacaccggcgcgcaggcggtgcggtcgcgcaacggcctgctgaccaccattgcctggggcctggacgggcgcgtggagtacgcgctggagggttcgatcttcatcgccggctcggtggtgcagtggctgcgcgatggactacgcatgatcgaacgcgccagcgacagccaggcgctggctgcgcaggtgcccgacagtggcggcgcctacctggtgccggcgttcgtcggcctcggcgcgccctattggcgcagtgatgtgcgcggtgcgatgttcggcctgacccgtggcacccgcaaggcgcacttcgtgcgcgccgcgctggaagcgatggcctaccagacccgcgatgtactcgatgcgatgcagtccgatgcgggtatcgcgctgaccgagctgcgcgctgatggcggtgcgatcggcaacgacttcctggccggtttccaggccgacattctcggtgtgccgctgctgcggccgcgactgaccgagaccaccgcgctgggtgcggcctatctggccggcctggcagtggggttctggaacagccgcgaacagatcgccgcgcaatggggcctggaccggcgcttcgagccacggatggaggtggcccggcgcgagaaactgtatgcgggatggcagcaggcggtggccgcgaccctcgccttccacgtcgattgaaacggcaatgccctgccctgctgcggcacgtggagtgacactgtagagccgagccatgctcggctgctgctggcgggataccgcaaaaagcagagccgagcataggctcggctctacaggcgaatgggcgctggcgtcagaacgccggcagcaccgcgcccttgtacttggtctcgatgaacgccttcacctgcgggctggtcagggccttggccagcttctgcacgcgggcgtcgtccttgttgtccgggcgcgcgaccaggaaattcacgtacggcgagtccttgctctcgatcgccagcgcatcctgggtcgggttgaggcctgcgtccagcgcgtagttggtattgatcagggccaggtcgacctggtccagcacgcgcggcagcatcgccgagtcgagctcgcggaacttcaggttcttcggattggcgatgatgtcgcgctgggtcgccagtgcgttggtcgggtccttcagctcgatcacgccggccttgtgcagcaggatcagcgcgcggctgttgttgctcgggtcgttcgggatcaccacgtcggcgccttcgcgcagctcggccagcgacttgaccttgcgcgagtacgcaccgaacggctcgatgtgcacgccgatcaccttcaccaggtcggtcttgcggtcgcggttgtaggcatccaggtagggctcggtctggaagtagttcgcatccacctgcttctgcaccagctggtcgttgggctgcacgtagtcattgaacacccgcacgtccaggtccacgccttcctgcttgaggatcggcttgaccacctcgaggatctcggcatgcggcacggccgtggcggccaccaccagcttctgcgagggctcgccggacttgccgcaggcggtcagggccagcgcagcggcgagcaggggcagcaacagggtctttttcatgggggattgaattctcgggggagtgtcaggagttttcgtagttgctcagggccagctcaagcaacgccttggcctgctcgcgcagcatcatgggctcgacgatctcggcatccgagccgtaatgcagcacatccatcagcagctcgcgcgagacgctgtacggcaccttcagctcatagcggccgtcggccaggaagcggccctgctgcttggaatgccagtgctcgtcggccacccagcgcgcggccttggcgctgaacaggatggtcgcccagcccttcggcgcgccagagaagatgccgtagctggcgccgagctgctcgtccagctcgctgtcggcgacgtcgcgcgcggtgctgtcgaccacccgcgccttgtggatgcggtcgaccgcgaaactgcgcagggcgtcgcggtcatggtcccaggcatccaggtaccagttgtcgcgatagtgggtcaggcgctgcggcgagacggtgcgcttggtcggctcgtcggtggaacgggcacggtactcgaacgccagctggcggcgctccagcacggccgatgcgacgctgcggaagctgccttcgtcaaacttgcggccacggtgcggaatcacccgcacgcggtcgaccggccagctggacacgccggcctgggccgccagcaggctctcgatgcgttgctgcagcggtgccagcaccgacgacagcacaccaccgccggtccgcgccagcaggtgctgcgaggccagcagggcatgcagctcctccgagctgagccacaggccgggcagctcgaaacggtcgctctcgtcagcctggtagcggaagcccgcctcgccgtcgccctcgatcggtgccatcagcgcatcgcgcaggaaggccaggtcgcggtagacggtggcgcgggaacaaccgagcttgtcctgcagggtcgccaccgtcaccggatagcgcgcggacttgagcagacgatgcagggcggtgatgcgttcgtatcggtccatacccccgattatgtccgagtcgcgggtcttgtgtgggacgtttgggctatcgtggtcgcccccacccccatggaatgcccgatgcgccggttgcctgccctgtccctgctggcctgcctgctgctggccgcctgcgatcgcgcgccggcgccggccggcgccgagcccccggtacccgtcgccgatccgacgcaggcggtgctgcgcgccagccagcgtttcgcggccctgcgcagcttccacgccgaactggaggtgctgggcgcgccgcagccggcacgcagcgccatggacttcgtcgcgcccgatcgtttccgggtggagacgccggcggggccgcagaccatcatcggcgacaccatgttcctgcaggccgacggcgcgatccgccaggtgccgaccccgcccggcctgctcgagcaatggcgcaacccgctgcccgccgatgccctgcccgccgaactgaaggccgaagatctcggcagccagtcgctggacggggtgcagacccggcactaccggctgcgcggcacccagcccggggaacgcctggagtactgggtggatgcccagggcctgccacgccagatcgtacgcagcggcagcagcaatggccgcagcttccagctgcgcctgcgctattcgcgcttcaacgaccctgaggtgcgcgtcgatctgccctgaataggcgaccgcgccaacgttcgctgaagcgcgcattggatcgattcggaccgccatcacgcttccagtatcatcaccggctgtcaaccgttccggagaagcctcgatgtccctgcgcgtgtccctgctggtccccctgctgctgtgtgcgccgctcgcatacgcacaggatgcctccgaactggcggcgatgtcctcgccgtggagcggcagcggcggcgagctcggctttgcctcggcacgcggcaacagcagcaccgagagcttcaacggccgtctgcgcctgcgctacaccgacggtgactgggtgcacagcatggacctgttcggcctgcgctccagctccaaggtgaccgaaaccaacgacgacggcaccaccacccgccgcaacaacaccaccgccaaccgctacaccggcagtgccggcagcgcgctgcagctgggcgaacaccgccagctgaccgcgacggtgcgtacggaacgcgacgacttcgccacctacgaccgccagagctcgttcggtctgggttacggcacccgcctgtggaacaccgagcgcttctcgttcgacgcgcagatcggccccggtgtgcgccgcacccacagcaccgaggacgaccgcacccgcaccggcctgatcggccgtggcctgttcgacatgaagtattcgctgactgacaacaccgacctggtcaacacgctgctggtcgaatccggttcgtacaacaccttcggccagaacgacttcggtgtctcggtgagcatgaacgagcacctggcactgaaggccggctggcaggcgcgctacaacagtgacgtggccgaggacaagcgcaagaccgatacgctgaccacgatgaacgtggtctacaagttcaagtaagcagaacgggcgcccagggcgcccgttcttcttccggtagtgccggccgctggccggcaactgcattcaactggggcacgcggttgccggccagcggccggcactaccggcggtagctcagacgttcagcagttcgccggcaccggcttccagcagcatcttcgccacgcgctggcccagcgcctccggatcccgggccggtcccaccgcctcggcgcgcaccgcacgaccatcgctggcactgccgaccaggccctgcaggtgcaggtcgtcgccctgccactgcgcgatggccgccaccggcacgtggcagctgccatgcagcgcgcggttcatcgcccgctcggcttccacgcaggcgcgcgtagcggcgtcatcaagcgtggcgaacagcgccatcaggcgcgtattgccaccgtcgcactccaccgccaccgcgccctgcgccggtgccggcagccactgcggcggctgcaggcgcgcgacgatgcgcccgcccaggcccaggcgctccaggccggccacggccagcacgatggcgtcgtagccaccattgtcgagcttggccaggcgggtgttgacgttgccgcgcaggtccagcaattccagatccgggcgcagcgcgcgcagctgggcctggcggcgcagcgatgaggtgccgacccgcgcaccgatcggcagcgcgtccagcgaggcgtacaggttggagacgaaaccatcggctggatcgtggcgggtcagcatcgccggcagcgcgaagggttcgtccagttccatcggcacatccttcagcgagtgcacggcgcagtcggcctcaccgcgcagcatggccagctccagctccttcaggaacaggcccttgccaccgatggcggccagcgagcggtcgagcacctcgtcaccgcgggtgctcatcggcaccagttccacatgcagcccgggatgggcctggcgcaggcggttggcgacgtgttcgctttgccagagggcgagcgggctcttgcgggtggcgatgcggacggtttccatccggtcattatcgcgccttcggcgcggatacggccaacggcggagcccctcgtggctggtgcatcggctggatctatcgcgcttggccgggcggggtgggttcgcgggggacgccgtgaatccgtccgtggaggcttggccgcggcatccatgccgcggacacccccgcgaacccaccccgcccggcctctgacagtttccgtgtgcgtcagccacggaagatcaaaagaaaagaaaaaagagcagaagcaaaagcaactgccgaaggcttccggggtcagatcccttttccgcaggaaaagggatctgacccctcttcccccacccgataacaacaatgcctttgccgtccgacgcgggaaaaacgagagggttgggccggggtggggtggcgggaccgttggcgccatggatggcgccatcgagcccccagggatgggtctacggcgtgtcccgccaccccaccccggcccgacccagcacgtaagaacaacgagccggccaacctgctgttgatcttgatgttgatgttgatctgtaagcagtcgcggccgcaggccgcgcgggaccactcacagatgccgcagttcctgcttcagcgtcgccacacagcggcggctgacttccagcggctgcctgccatgccgcagcaccgcctgcacctgcccgccggagccgcggcgcagctccaccagctcgtgccgcgccaccaggcagttgcgatggatgcggatgaagcggctggcgaactcttcctccagcgacttcagcgattcctcgatcaggtcctcgccgcgcgcgtggtgcaccaccacgtacttctcttcggcctgcaggtagtggatgtcgtccagcggaatcagccgcaggctgccgcgcaggcgtgcgcacagtacgctgcgtgcctgctgcccgctgtgcgcctgcggctggccatcgcgaccggccaggaacgtgcgtgcccgtgcaatcgccgctgccaggcgttcggcgcgcaccggcttcatcaggtaatcgatggctgccgcttcgaaggccgacagcgcatgcgcatcgtaggcagtgcagaacaccaccgccggcctcggttcgaagctggccaggtggcgggctgcttccaggccgtccagcccaggcattgcgatgtccagcaggaccaggtccggctgcagctccgcgcacgcgtgcagggcctgctcgccgttgccggcctcggccaccacgtccacgccgtcctgtgcggccaacaggctgcgcaggcgctcacgcgccagtggttcgtcatcggcgatgactaccctcacgatcgtcccctcactggatcggcactgtcacctggcaggcatagtagccctcgctccagccagccgtcatccgcgcggcactgccaaagcgccaggccagccgatggccgatgctgtgctgggcatggccagccccccgcgccagggccagcccgggcgcctgcggatcaggcgcgggattgcgcacgcggatctgcagatcgttgccctcgcgcagcagctgcagctcgatggtgccgccctcgggcaggcgcgaaatgccatgcagcacggcgttttccaccagcggctgcagtaccagccttggcaatggcaggtcccacggcagcggctcgtcacgctgccagcgcacctgcaggcgttcgcccaggcgcagcgattcgatcgacaggtagcgctcggccagttcgcattcgtcgcgcagggtggaatcgccctcgcctgcaccgagcgcagcacggaacagatcggacaggtcgagcacggcacgctcggccaccgccgggtcccgatgcagcaggctggcgatgaggttcatgctgttgaacaggaaatgcgggcggatgcgcgcctgcagcgcatcggcctgggcgcgtgcattggcctgcacctgggcggcccagcggtcgctgacatagaagtagcgcagcgccagcgcgctgatcagcgcggtggtggcggcgctgccgagggtgaagcgccagaagctgatgccgttggcgaaactgtcacccagcaccgcgtacagcgcgtgcacgatgccggcgcagaccaccgcgatcagggccgccagtgcgatggcagcgaccgcccccatcacctgcggcagcctggacagcgcctgccgcagcaggcacaggctggcggtcacggccagcgccagccacagcgcgaagccgctggccgacagcagctcgccaacggtccagtggcggctgccatccggcgcaagcgccagcaccaccaccaccagctcggccaggcccagcatcgccgccagccgcggcaggcggcacagttccggcatccacggcgatgggctggccaggggcatggctcaggccgcgcccagccgttcctgcagccagtcacccagtgcctggatttcctcggcacagacctggtgggccatcgggtagctgtgccacgccacgtccaggcccagcgtacgcagcgcctgtgcgctgtgggccgccacggcctgcggaatcaccgggtcgccactgccatgggccatgaacaccggcacctgcaccgcgccttcaacgcgcgtggcactgtcggcttcgggcagataggtggacagggcgatcaggccggccagcggcgcggtacgcgacagtgcagcagtcaggatgatcgcaccaccctgcgagaagccggccaggaagatcttctccgccgcgacgccacgctcgatctcgcgcgcgatcagcgcgtccagctgcaccaccgattcctgcacgccggccatgtcggcacgcgaccggaagtccatgccgacgatgtcgtaccagccgcgcatgggcacgccgttgttgatcgtgatcggccgcaccggtgcgtgcgggaacacgaagcgcagcgccggccagtgcggccgcaccagctccggcacgatcggcgcgaaatcatggccatcggcgccgaggccgtgcagccagatcaccgaccactgcggcgaggcgccggtttcctgttccaccgtttgcagcatgatgcggctccttcaagttcgagccgcattatgccgctggcgtggggcaatcagtacagcggcggttgctcggccgcttcgcgccgcagctgcgcggcgcggaccagtaccggtggcgggatgttctcttcgggaatgtccagcaggcccaggcgatgcaggaaggcgcccggaccacgcgaggaggtcagcgccaccaccggaatggccaacaccatgccgatcaccaccggcgccatccacgccgccagcgacggcgacacggcccaggccagcacgcccatgaaggcgccgaacacacccaggccaccgtagccgcggatcagtgccagccacgagatgccgccgtcgtcacgctgctgcgcatcccagccggaatcgcggccggacaacacttcggccacgccccgcgactgcacgtacatcaccaccggcgccatcagcgcggccagcacggtctccaccagcatcgacacgaaggcacggatcgcaccgccgcagccgcggcggtcgaccgggtccagcagcatcgccaggtaaccgagcaccttgggcagcagcagtaccgccatcgtggcggcgaacaggcgcaccacctgctcttcgtcctgtgcgcgccagtacacgctgggcgacaggtgcagcagggcattgaagtcgatgccctcctggaacagcgggatggcgatgccgatcagcatcagcattgcccacatcggtgcggtgaaatagtggccgatgccgatcagcatgtgcgtgcggctgatccagtgcaggccgcggctgcccacgaccttgccgtgctgcaggttgccctggcaccagcggcggtcgcgaaccagcagatcggtcagcgtcggcgggccctcttcatagctgccaccgaggtagggcaccatgtgcgcggcccagccgccacgacgcatcaacgctgcttcgacgaagtcatggctgagcacgtggccgccgaacggcttgcgccccggcagcgccggcaagccggcgtggtcggcgaaggcgcgggtacggatgatggcgttgtggccccagtagttgctctcggcgccatgccaccaggccacgccacgggcgatcaccggcccgtacacgcggccaccgaactgctgcatgcgtgcgaacagggtgcggccgccgatcaccgacggcagggtctggatcaggccgacgtcggcgttgtgctccatgccggccaccaggcgcacgatgctgtcgccggtcatcaggctgtcggcgtcgaggatcagcatctgcgggtaggcaccgccgaagcgacggacccagtcggcgatgttgccggccttgcgcccgctgttgtcaccacggcggcggtagaacaggcggatctgcccgtccggcacccgctcgcgcagctcgccgaacacccgctcctcggcagcggcgatgtcctcgcgacgggtatcgctgagcacgaagaaatcgaatcggccgagctggccggtggccgccaccgactcgtagatcgcctgcaggcccgccagcaggcggcgcgggtcttcgttgtaggtcggcatcagcagcgcggtgcggctgtgcacggtcggcagcggcttgtccgggtcgatgccgaggcgatagccacggtcgaacacggcggtcaggaagccggccagggcgctggcgaaagacagcgcgatccaggcaaacaggccaacgaacagcaccagcaggcaggcttcgagcacgctgatgccattggccgacagcacccgccacatcatccgcgtggccacggcggtcatgccgagcgtgccaccgaagatgtacagccggcgcaggccgatcaggcgcggcgacgtgcgatgccgccggaccttcagtgcaccttcgcgcagggtctgttcgggcatctgcaacggcgattcagcgggcagcagcgcccagccggcgtcgagccggggcgtttctgcttccgcatggatggtctgcacccccatcgccgcctactccgcgccgtcggcacggccggccatcccggccgggctgcatgcaccaaggttcccggcgcgctttcccggcgcccgcacttgtccagactgtgtcggcttcaggccgcacagtcgatgtctgtcactaccggaacccacacgatctccaacggggcggaatcgaaaatgcggcccagtctagggcgctgaatgtaagccgggtgcgaaggcctacgccgggatttatccccattcagcaaatagcaggcgatcacgtcgggggatggccagatgtcattgcatcgccccgggtactggatcgtatcaaacgcgaacggttatcatttcattaaccaggcaggtcaccgtcttccgcacggccgcgacccacccagctgcgccggtccacaccgcgcgcaccgacgacccacggaagggtggctgcctgctgtctgcctgcgcctgctgcttccaccgggtcaccccacctcccatggaagccgccatgtccccatcgtcccgttcccgttccgcgcgcctgccgcgcacccgcctggcccctgccctggcctccgcctgcctgctggccctgccaggcctggccgctgcagaggccggcaccgatgcctccaccaaggatctggataccgtggtggtcaccgcctcgggcagccagcaatggatcaaggatgccccggccagcatcagcgtgatcagccgtgaggacatcgagcgccagccggttcccgacctggccaccctgctcagccgcgtgccgggcgtgaccggcggcctcagcgccgtcggcgaacagtccaagatcaagctgcgcggcatgccgtccaactacacgctggtgctggtggacggcaagcgcatgggcagctcggccgcgaccaactaccgccccgacctcggccgccaggacctgaactggatctcgcccgaccagatcgaacgcatcgaagtggtgcgtgggccgatgtcctcgctgtacggctccgacgccatgggcggggtgatcaacatcatcacccggcgcatcggcgacgaatggaacggcagcgccacccacagctacacccgtcccggtgatggcaagcgcggcgatacccagcagatcggcgcgaccttctccggcccactgggcgaacgcttcggcctgcgcatcggtgccaacagcatgcgccgtgattcggaccagtccaaccacggtgtctacggcaatgcctacgccggcgagaaggaccgcactgtcgatgcgctgctgcagtggaagctgagcgacgcacaggaactgtcgctggaagccggccatggcgtgcagcaggccttcatcgatgcgtcgctggaaaagcaggacgaaggcgcctggggagcccgtgagctcaagcgcagctcgctggcgctcaaccacgatggcacgtggagcttcggcacctccaggctcagcgcgtactggaccgaatacaagaacgacatcggcgccaccggccgctcagaggccaccgacacgatcatcgaaggcagcctgaccacgccgttcaccctgggcgttgaacaccagtttgccgtgggtgggcagtggaagcgccaggaactgaccaacaccgataccatcggccgcgcgccgatcgactacgccggcaacgccgtcagcggctccagcctggaagtggatacctgggcgctgtttgtcgaagacgaactgaagctgcaccgcaccctggccctgaccgtgggcgcgcgcctggaccaccatgagaagttcggcggccacgtcagcccgcgtgcgtacctggtctggcatccggccgaacagtggaccatccgcggtggcgtctccaaggggttccgtgcgcccagcctgaccgagaattcggccaccgctgccacccagtccggcggccgtggctgcacctcgctgatcccgctgggttatacccgcggcgggtgctacatggccggcaacccggacctggatccggaaaccagcaccaaccgcgagatcggcatcagcttcgacaatgacctgatcgatgttggcgtgacctacttccacaccgacttccggaacaagatcgaatacgcaccgctgggccgcttcaacggcatctggtggacgcgcatgagcaacgtgcagcgcgcgcgcaccagcggcatggaaggcaacttcaacgtccgcttcggcgagcagtggcgctggcgcacctcggcaacctggatgaaggaagccaggaacctgaccaccggccgcaacctgatcgatacgccggaattctccggctactcgtcgctggactggacgccgaatacggtgttctccggcagcctgtcggcgcagtacaccggcaagcagaccggcaccgccacgaccttcctcaaggcctacaccctgtatgacctgaccgtggcatggaacgtcaacgaggtgctgaccctgcgcggtggcgtcagcaacctggccgacaagaagctgtatgcggaaggctccaccgactacttcgtcgccgggcgcagctacttcctcagcatgaccgcgcgcttctgaccggcggcacgcgccgtgatcgcgctggcgacatgccagcgcgatcgacggtattgcgggttactcgctttccagcgcggccggtgccgcgtcccgcgtggcggccgtgcgcgcacggtccatcgccaccgccagttgctggcgtgcgagcagttgttgtgcctgcaccacttcaggtgtcggcaggagcaccggtcccggtgcgttttccggtgtagcaggtgtggtcatgcaacctccatggacatcccgccgccgcacgggtccaaccggggcggcagcggaactgcgcaccctatcctaaaaacaaggcgggcgggtgacggtgcggcacccggccgcagcacgtggaacacggcacgcgtcacatttttgacggcagcccttggatcctgaataggacttgccttatcatgaaaacgttttctcacagggatgtttcccccaaatgaataccactgacctgtcccagttcagcccgaagtggcagttccgcttcaatttcttccgccagcatggcgcgcccaagaatcccggtttcaagcaggcctggaaggcgctgtcgttcggtgaccgcctgaagatcaacctgaacttcttcgcgttgttcttcggtgcgatctacctgttgatcctgggcatgtggcgcaaggcgctggtggtcatcggcatcaacatcgcgctggccatcgtcagcatgttccttcccgacgtcgtcgggcgcatgctgttcatcgcgatgaatctgctggtcgcctccagcaccaactacagctactacctggagaaggtggaaggtcgcgccagctggaacccgtttgaaggaatgttctaagccatcagaccggcgcagggatgcgcggcaaggacgcaaccgacgcccggcccccgccgggcgtcttcatttgcgcgatcaggccgcgcggcgtgccacggccgccggctcggcctgcaggcggaagcgcgacaccgccaccgccagctgctcggcctgctcctccatcgcgcgcgcggcggcactggcttcctccaccagcgaggcgttctgctgggtggtttcgtccatctgcaccacagtctggttgacctgctcgatgccggccgattgttcgcgcgacgcggccgagatctcggccatgatctcgttgacccgaccgacctgaccgacgatgtcctgcatggtgcgccccgcgccgtgcaccagctgcgcaccggcaccgacctgggccaccgaggcgtcgatcagctccttgatctccttcgcagcacccgccgaacgctgcgccaacgcgcgcacttcactggcaaccacggcgaagccacggccctgctcaccggcgcgcgccgcttccactgctgcgttcaacgccaggatgttggtctggaacgcaatcccatcgatcaccgagatgatctcggcgatgcgctgcgaagacgcctcgatctgctccatggtgtgcaccacctggctgaccacctggccgccttcgctggccacgcccgccgcggaaccggccagcgcgttggcctgcagcgcgtggtcggcgttctggcgcacggtggaggtcagttcttccatcgacgcggcggtttcttccaggttggcagcctgctgttcggtacggcgcgacaggtcgctgttgccggcagcgatctcaccggcggccaggcggatgctggctgccgactgctggatctggccgacgatctgggtcaggtgctgcacggtgctgttggcatcgtcgcgcatcaccgcaaacaccccatggaagtcaccctgcatgcgggtactgaggtcaccgccggcgatcgcgcgcagcagcgtcgacagtgcggccaggttgtggtcgctgacttccatcatggtgttgagggtctccaccatgcggcggaaatcgtggtcgaagcgcagtgcatcaccgcgcacggcgaagtcaccggcggcggccgcagcggcaagctgctggatctgctcgttgatcgcggccaggttgcgcttggtggtcgccatcgcagcggtgaacaccgccttctcgcccggcagtgcttccatgtccacgctgaggtcgccgacggcatagcgctgcatcacttcaaccaggcgctgggtgatcgcgttgctggaggccaccagctggttgctgtcggccaccatgcggccgtactcgcccgggaacgccgcggcatccatgcggtagctgagttcaccggcatcgtggcggcgcgccatttcggcctgcgcagccatcaccgcctgcagctggccgcgcatgccctgcatcgcgtccagcaggcgccccacttcgtcgttgctgcgcgcaggcaggatgctgtccagcttgccggcggcgacgtcaccggccacgcgcaccgcttcggccagcgggcggatcgccaggcggcgcagcagtatgtagacaccggcgctgagggtcagcgcggcgatcacgccgaccagcagggtcagccacagcagctggcgcgcttcggccacgatcaccgcatgcggcatcaccacgcccagcgcgaagcgctgcggggcatcgcccacgcgcagcggcacatacacgcgcacgttgccggccgcatcggggctgaaggcctcgaaggggcggtcggcggcgatctcggccagcatgctgcgggtcagtgcgtcgttgcgaggcttgccgatttcggcggcattggccgaggccagcaccacgcccttcggcgacagcagttcgacgcggccggcccccatcggcttcagcgtggccaggtgcttctgcaacgctgccagcgagaagtcgacggtgaagacaccgaggaacctgtcgttctcgatgatcggcgtgctcagcgtactcatcagcacctgctgcccggcgatgtcatacgcatacggttcgctcactttcggcagcttgtcgcggctgggcaccatgtaccagtcaccggaaccgctggcggtctcggtgtaatcggtcatcaccgactgctgcggcttgccctcctgccaggcccagtagctcatgtagcggccggtggcatcgtgcgcctcggtgttgacgaactcggcatccttgccgtcgaaggcatcgggctcccacatggtgctcttgcccagccattcgggatgggcgcgcagctgctcgcccagcaccgccgccaggctggcgcggtcgggcacgtcaccacgggcgcgctgggccagcacgccttcaaccatggcatcgttgctggcaaaggcggtgcccagatcggccgccacctggcgcgcctcagcggtcgcctcgctggtcatggtctggcgcgaggcgctgataaggctggcgctggcctgtcggtagatcaggaacgcggtcaggccgaagcacagcagcgcgatcgcggcggtgcccagcatcagcttgtgggcgatgctgcccgggcggcgggcagcggcggaacgggaagaaggcatgggagggtccgcaaggcagttcaggacgaccggcaccacgaaggcaccgcgcaggcgcgcgatccgtcgcgcaggccaccggccgccgggcgggcccggcgctggaagcgcaccgggttagcggccgcccgccaacgaggttgaggcgaccggcctgcacattcctgaatctgctcagggtcgggtcagccacccgtccgtcgcgatggcctcactcggccacgcggtccttgatccactgcgcgcgcggcagtacctcgatgctgccgacggcatactgctgcagcacgtcgtccggcccgaagcacggttgccagcccagctcactgcgcaggcgggcactgtcgtagacacggtcgatgctcaatggcagcggccagccacggcgttcgaactcggccagcagctgcggcgcgcgacgggccagcacgctgcgcgggtgggtggccagttccaggcagtcctcgcgccggaacggcgtcggtgcgcaggcgagatagcgggcgaatcgggcgccttcgtcgagcagcagtgcagcgtgtgcgctggccacatcgcgggcgtcgatgccgcgatgcaggcggaacatcgccatgcgctcgggcggttccgggaagcaccggcccatgcgcagcacgcgaacgctgaagcccggcgtggcggcagcttcagccagggtctcggcctgcagcttggtgcgatggtagatcgtgcgcggcagtggctcggtgtcttcgtcgatccaacggcagccaccggctaccacggcatggccgtacagcgcggtggtgctggtcagcacgaaacgccgtgcgccggcttcgcgtgcggcctgcagcaggtgcgcggttgcctccacgttgatctgctggaataccgcgtccggcaccaggccgacatgcggagcatgcagggccgcggtatggatgaccgcgtccacgccctgcaccgcacgcgtgaccgcctggcgatcggtgacatcggcaatgatgcgcgtggtggcgaacgggctgcggtccagccccaccacttcgtgggcggccgccaacgcaccgaagatcgcgcgcccgatgcgcccggaactgccggtcaacagaatcttcattgagtccattcactcgaagcgcccgggaactaccgggatgcttcgattctaggcatgcattcgcgcatctgcgataggacagccatgcaatcgtgcgttcatcttgacgacttcgcaggcgccagcagttgccgcgcgatgaacagcggatcgtcgccgccggccacatcaggcctcacgccggtgccttcccagttgccgccggtgcgcagattgatcggttgccggtcgggaatgctgatctgatagccatcgggcagcagcacaggatcaccaaacatatgcgcggcaccgccactgcgcgtgccgacaatgcgcgcgcggcccagggcctgcagcgaataggcgacgaactcggccgccgaaccggtacgccggtcgatcagcaccaccagcggcttcaggtacacaggcaggctggcaggcggcagcggtaccggcgtgcgccggccacgctggtccagctgctgcaccgcgccgatcttcgcgtccagcagcgtgcgcaccagcaggtcggcacttgcatcgtcgcctcccccgttctggcgcagatccagcaccaggccatcggtgtcggccagcagcgtgaaggccgcagcgaacttcggccgcgccagatccagcgggtaaaaagtactcaaccgcaggtagccaatgttgccttccagcacccgcacctcgcgcacaccggcaccattgctgcgggcatcggcacgccaggccatcaaccagtcgtcctggccggcagctgcgtccacgcgctcaacgtggaagtggccatcgaacatgtccaggtcctggttcaggcgtgcgctgaacgcagcaggatccgaacaactgtccgcatagcgctgctgcgccgaccagctgcgcagggcatcggcgatgcgggcggcctccgcctcgtccaggtactgcgcctgcacggcgctggcggccgcctgcagcaccgcatcctgcgccgggcaggccgtcgccagcagcgcgccgagcatccaggagaccaccatcatccaccccgcattgaggatatataagcgcttatatatcatcccgctcatggatctccaacacgccacactgggtaccctgctgcgcgccctgctcgaccagctggacccggccgtcgagcaggcctaccggcacctgcaactggactaccggccgcgctacacgccggtgctgcgcacgctgatggcgcagggcccctgccggatcaaggacctcgcgctggcctgcgggctcagccattcggcgctcagccagaccgtggcggcgatggtgcgcgatggttggctgcacactgccaatggtgacgacgggcgcgaacgcatcctgcagttgagcccgcgcgcgcagcgcgcgatgcccgtgctgcaggcgcaatggcaggccaccgcagtggcggcacgcagcctcgatgccgatctggggcagtcgctggagcaggtgctgcgcaaagcactggtggcgctcgaacaacggcccttcgcacagcggctgcaggacgcccgccggcgctgaggcgttactgctctgcagccatctcgatctcgctgaggaaggtccagctgccgttggccacgcgcagctccagcgtgcggcattgcgcagccaggggggctgcattgccgagcacgtactcctcttcggtcgagcccatcacgccggactgggtgaagggtgccgacagcgtgccgatggttacggcggcagttccgggctcggcgcacatcacctccaccgaagtcggcgtgacgatgccccaggccgggcgggtcatcgtatgcaggccgatccagtccacccgtcggcgctggcccaggtcgatggtgatgctgacgttgccgtgcacgcctacccagcccgcgtccatcggattgcgcgggtcgcctacccggcggtcgaacagctcatggccgctgccgtcgggatagctggtcgccggcgccacgctgtagtgataggtggtctgcaccggatcgacgaggtacgaggcacccaacccgtacaacccgcgataggtgttcatcatccgcggcgcctcgccgtagccctggccggggccgaccacttcggacaggtggtactggttgagccaggcaacgcgcttgccagccgaacgcgcgctccacaactgctggttgatgcgctgcaccgacgccgaccggtatgcaccggacaggccgttaccggtatcaaggaacagcgggctgccatggttgaacagctcgatgtcggcccacacagcgctggcgcccagctgcgccgacaacgcctggtagtactgctcggtggaatagcccggtcgatcccactggaacagtttcgcgtgcgacgccgcgccgatgccgtcctgccagatctgcacgtcgacccccgtggcagagcgaaaccgtagcgcagcactggccacgctggccgggtcgacgctggaggatgccagatagggcgccaccatcaccggcctggatggcgtcgccgctttcagtgtggaaacgattgaacgatagaacgacgcacgctcggccggtacctgcgcgggctcatcggtgatgtaccagccggcgaatgccggatgcatcgcgtactgctgggccagctgcgccatcgactgcgctgcgtcctgcgccaccgctgcagcgttcgagccctgccagaacgccgcacactggcccgaactgtaggtggtgccgaccacgaccttcatcccacgcgctgcggccgcgtccagcaccgtgcccagcttggccaggaagccggcgatccattcgaaatcctgcgcgctgctggcgcagcccacgccggcacgggtggcgcgggtctggccgatgatgagcgtgtcgttgcccaggtcccgcagttcgtcgaggaacagcggcagctgcgccgctggcagctgctcatcggtggacgagtaaccgaagtgaacgaaactgccgctcagcagcgcagtgtccgcatgggccggtgcagcgcaggccagcagtacaagccatccgaatctgttcacggcgtcctttcctgtctgggcggtcatccgccatgccggtccatcctagccaagcggcgctcatcgcgcagcggcgtagttgcgccgtgaaagccggtgcggcgtggcgtgagggcagcaccgccggtgcggacactgccttagccgggcacacgcaaggatgagctccccttccatgcaccgggagccttcacatggctgaccagcatcacggcacctcccatcgtggcttcgcttcgatggaccgggacaagcagcgcgcgatcgccgcaaagggtggacgcgccgcgcatgcgtccggcaatgcacatgagttcagcccggccgaggcacgcgtggcaggccgcaagggcggcgaggcgatcagccgcaatcgccagcacatggcagcgatcggccgcgaaggcgggcacgcgcgccacgccaatgcacggcaacagcggcagcacgcggccgaacccgcgccgacgaaggaaaggccgcaacgccagcagggctgaccgcagcgtgctcaggcgcgcctgcactggcggtacagggcgagcgccgccaacagggccagcacgccggcgacagccatcgcccagccgaaaccgctggccatcgcgccgcggtaccaggccagtatctgcgtccccggcagcagtgacgacggctgcaggatcagcgtgcgcgcctgtgcggccactgcgggctgccctgccgcctgcgcggtcgcagtgaactggcgtaccgcgcgcaggcccatcaggctgcccagcagcgcgatgcccaggctcatgcccgcctggcgcagcgcgttcatcgtggccgacgcaatgccggcacgctcggccggtacgcatgacatcaccgccatgccggtcgcaggtaccgccagtcccatgccagtgccgagcagcatcagcagtgcgctggcctggccgtgcgctgtagtcggctcgaacgtggcaatcgcacacagcgccatgcctgtcattgcatagcccgtcaccagtgcggcatgcagcccgaaccacgccgccagacggccgaacagcagcgacaccaccgccatcagcacgaattgcggtaccagctgcgcaccggcctgcgcagccccatgtccctgcgcctgctggaagaacagcgacaggaagaacaggctcgcataagcggtgaatccaagcacgaacgaggccaggttgagcatgccgaaacccggcttcgccaacaggtccagcggcagcagcggccgcgccacgcggcgctcgacccacgcaaacagcgccaggccggatgctgcgatgccgagcgccagcagggtcgaaggtgccagcaggccgtgctcgccgatcgcgatcaggccgtaactgagtgcacccagcgcgacgatgctgagcagctgcccggccgggtccagcgcggcgtgctgcggatgccgtcgctcaggaatgccccaggcccccagcgcgagtgcaagcaggcccagcggcaggttgatcaggaagacgctgggccaacctgcgcgctgcaccagttcgcctcccagcagcggccccagcaccagcgccagcgcgctgaacgccgaccagcccccgatcgcgcgtgcacgctggcgcggatcagggaatgcatggctgaggatcggcatcgcactcgggatcagcagggcgccggccaccccctgcaccgcccgccccgccaccagtgcggaaagactgcctgcgcaggcacacagcagcgagcccacggtgaaggtcgccacgctgagcagccacatgcggcggtggccatagcggtcacccagcggccccgccgacagcatcactgcggacagggcgatggcataggcgttgatcacccactgcagcccggccatgtcggtgtgcagtgcctgctgcagcgtcggcagcgcgacgttgacgatgctgatgtccagcgaggcgaggaaggtgcccaggtaggccgccagcaccagggccggccgtcggaagcgttgcatgtgcggatgccgggagggagcgtgcgcgcatcgtagtttgatgactgaccgtcagtcaatgaccggcggtcagtcattgccgggggaagctagaatggcgaccgtcgcacccggaccccgccccatgcagattcccgcagtcgccaggccccgcaccaaacccgctgaaacccgccaggaagagctgatggacgccgcgcaggcgctgttcctgtcacagggcgtggaagcgaccaccatcagtgacatcgtggccgccgcccacgtggccaagggcacgttctatacctacttcgcctcgcgcaccgagatcctgcaggcgctggcgcagcgctacacgctgcagttcatggccgaggtcgaccatgccgttcagcagcagcctgcccacgatggcgtggcgcgactgtgcgcctggatccgcgccaacatcgagacctatgtgcgcacgcacgcactgcacgacgtcgtctacgccaaccatcaccaccaccagcgcggcaatgccgagcgcaacgccatccagcagcagctgctcgacatcctcgaggcgggcacccgtgcaggcctgtggcagctgccggcaccgcagatcacggcctcgctgatctatgccggcgtacatggcgccaccgatgacctgatcgctgcgcccacgcaggacgccgacaccttcattgcggcggtggtggccgattgcctgcgcatggtcggcgtgtcgccggcgccgaagcgtggcggcacccgtcgctgaagcgcccgccgtcgctcaggcgtgggcgaggatgttcaacagccggccgaacgggtcgcggacgaagaagcgccgcacgccccagggctcgtcggccggcccatagtccagcgcgatgccagccgcgtgcatgcgttccagcacctcctgcaggttgtccacttcgatagacaggtccggcaccggtgcgccggaacccccttcgctggcgaagctgacctgcgccagcgcactgccctgcccgccatgggtgacgatccagccatggtccatcaccaccggcatgccgagcagctcgccatagaatgcagcggcgcgggcgggatcagacgtggcgatgttggcgacgacacgcatgacggccatgttccactccaccaggaagaatgcgccgagagtgcccgaccctgcgcacaaacagaagagccccgtcatggacggggcccgtcatcagccgatcatggctgggcttacaccgcgccgcagcgctccatgacgcatcgatcgtattcgtactggcattccatggcatcacccccaccggctacacacgcctggtaggccttccagcagggaaaatcgcagggctggaccggtccggccacggccaccgacccactacaggccaacgcgaacacagcaccggcgatcactttcctgaaagtacgcatcgacgtcactccttgataagcctggtgagcccaggccgggcaaccttagcgctgcacacgggacgttgggtaaaggcggatgcggctggactcagtgttgcagcattcccaggacacgcagttgcccggccagctcatcactgttgcgccacggcaggatcggcgaattgccgcgctcgtccggcggggtgtccggcagcgcgtcggacccgccacctgcccctgcaagcggcagcagcggccgcttgtgcagccaaacctccgaaatcgtgcaggcgcgcccaccgctgaccatgcaggcatcaccggcaagggccatgatcaggttgcgcgcatcccccatgccacagggcaccaccaccgtggccggccagtcggccggcggcatgctgccttccgggatgacgctgggcacctggccgccagctgcgcgctcgaacgcgtcgctgccagggtcggcaccgcccaatatcgccaacggtggtttacggaatgcggtacgcatgggcggttccgaagcctcggaaggaagggtcacggtgccctgcccgctggagccacaccatgcaccgatcacaaaacattaacacgttcataaaattcccttcacattactgggggatatcgccatgcgttggcgttaacggccttgttgtccgtcaaccaaggaagttgtccgatgaatcacccgctgtacggccgttcgtcccgctccctgtcgcatcgcccgctggcgcttgccgtcgccagctcactgctgctggccaccgcactgccagccatggccagcgaatcactcgagacctggcagcagcagcgccagctgcaggccgcgtgggcgcagcccgctgccagcaccgcacctgcaaccacggccacggcagctgccgccagcagcaacgccgttcttggcaatcccggcgatccggccagctggcgcagcgacgaattcaacgccgattggggcctgggcgcgatgggcgcggactacgcctatgcgcgcggcctgaccggcaagggcgtacgcctggcgctgttcgactcgggctccgcactggcgcatccggagtttgcaggacgcaatacctccagcatcaccatcggtgccgactgtgcgacgccgggcgtggtcgcaggggcgggcgcctgcgggcagacccgcggcgaacagcccggctacaactactacggactgggcgccggcgttccggcctcactggcggcacgcctgatcgccgccggccagccctatggcttcagctacgccgatcacggcacgcatgtgcttggcaccatcggcgccaaccgcaatggcaccggcatgcatggtgtggcctttggtgcggatctcaccgccgctcgcgtgttcggtgacacctactacgagtggcgcctggacccggacaggttctatcgtccgcgcgcggtgtaccgcaccgatccggatgatgccgccacgctggacatgtatgcgcagatccaggcgcagggtgtacgcgccatcaatcacagctggggcatttccacgcgcaacatgaccgccgccgcgctggaccagcagtacgccagcatcggtgccgactacggcgtatacggcagcatctacgccaacaacggcgatgccccgggttccactctcatccaggtgtggtcggctggcaacggcagcggcgcggttgccggcatcaccgcctcgatgccgcgctggaagcccgaactggaaccgtactggctggcggtcgccaatgtccgccggcccgacgccgccgcaggtgaaaccgactacgtgatcgatggcagttccagcatctgcggggttgccgccaactggtgcatctcggcccccggtaccgatatcgtcagcaccatcgtctccggcgatatccagggccgcatcgagaacacctccgcctacgtgcggctgatcatcgacagcgagaacaccagctacgtctacggcaccaagaccggcacgtcgatggccgccccccatatcaccggcgccctcggcctgctgatggagcgcttcccgtacttggacaacgcccaagtccgcgacgtgctgttgaccaccgcacgcgatctcggcgcgccaggcatcgatgcaatctacggctggggcatggtcgacctgcgcaaggccatcgaaggctacggctcgctgcgcgtggacaccaacgtggtgatgaaccagagggccggcggcctgaaggtctgggaaggcgatgcgtgggacaactggaccaacgacatcggcggccccggcaagctgaccaaatccggtatcggttggctgcgcctgagcggcaacaacagcttcaacggcgccgtggtgcaggacggcatgctggagttgaacggcgccaacacgctcacctcggcggtcgaggtccagggtggccggctgctgctcaacggcaggctggtctccaccgccctgaccaccaccggtggcgtcagcacggtcagcaccagcggcgtgctggataacagcaacctggtagtcaacggcggcgtggtgtccttcaacggcacgcagaccggtggcaccaccaccgtcggcgccaatggcctgctgaagggcgtcggcacgctcggcaacacccgcgtggacggcatcatcgcgccgggcaactcgatcggcacgctgaccatcaacggcaactacgtgcagggcgccaccggcgtgtatgcggcggagctggcaccgggtagtcgcagtgaccagctgcacgtgaccggcaccgccaccctcggcggcaccctggtcgccctgccggaaccgggcgtgtattacctcggcgaacagttcaacgtcctgcgtgccgacggtggcatcagcggccagttcgccaagaccgacttcagtgcgttctcgcctttcctgcagttcagcctggcctacggtgccaatggcacgcgcatcgacgttgcccgtggcgcttcgctggccacggctgccaacacgcccaaccagcgtgcggtggcggccgccgccgacctgctgccgatcgcccagggcctgcccaagccgctgacccagctgttcccgcagcaggtcggtggcgtgctcgatggcctcagcggcgagctgcatccggccacggccatcgccctggtcgagggcagccgctacgtgcgcgatgccgcgttgtcacgccgtgccggcgccaccgcgcccggcagcgacgtgggtgatgcgacgggtgcatgggtgcaggccatcggtggcaacagcaggctggacggtgacttcaacaccgcccgcaccgaggccaacagcaacggcctgctggtcggcatcgaccgcgagttctccggctggcaggtcggcgtgctggccggtaccggccgtaccgacgtcaagcagcaggaccgccgcgccaagtcgaagatcgacaacacgcacttcggtgcctatgccagccacacctggggcggcttcggcctgcgcggtggtgtggcgtggagcaagcacgaggtgaagagcacgcgtgaagtcgccttcgcaggtttcagtgacagcctgagcgcgcgttacgacgcccgcacccgccaggccttcatcgaagctggttatcgcttcggtggccccgaagccgggctggagccgtacctgcaggtggcgcgcgtggaagtggacctcaagcgcatcagcgaacgcggtggagcagcggcgctgcagggcaaggtggacgacaccggaaccacgatcgccaccgccggcgtgcgcttcgacaaggggctgaaggcttcgttccagcaggacagctggctgcacctgcgcgggggcgtcggctatcgtcgtgcctcgggggatcgcagccaggtcgccaaccttgcgtttgccaatggcagctccacgttcgcggtcaacggcgcgccgatcgccgacaacgcggtggtggccgaactgggcctgtcggcgtggctcacctcgcgccagcagctggagctgggctacagcggccagttcggcagcgagagccgtgaccatggtgcgaatgcacgctggtccgtgcgtttctgatctgtgcctgcaatgcgatgaaaacaggaggggcggccgatcggccgccccttctgcttgcgggtgacgctctttcagctcaggcgcacagcgcctgcatggcctgcgctgtgacctcgacgatctgcccatccacgatgtggacgctgcgacccgcgcacgccgccagctccttgtcatgcgtcaccatgatgatggtcatgccgccctggttgagctcacgcagaatctccatgaccccttgcgacatctgcgagtccaggtttccggtcggctcgtcagccagcagcagggccggcgtacccgcgatggcgcgggcgatcgccacgcgctgctgctgcccgcccgacagttcgccgggatagtgcgacatgcggctgcccagtccgacctgggccagtgccgagaccacacgctgcctgcattcggctgccgccatgccacggtagcgcaggggcacctccacattggcctggatggtcagatccggaatcaggttgaacgcctggaacacgaagccgatcttctcgttgcgcagcgcgctgagcgccgcgtcgcgcatgccgccaacatccacgccaccgatcgcgtagtggccgccggaaaagccctcgagcagaccgaggatgttcagcagtgtggacttgccggagccggaagggccggtaatcgagaggaaatcgccctcctgcaccgacaggtcgatggagcgcaatgcatgggtcatgacttcacccacctggaacactttgctgacgccttgcatcctgagcatgggaattctcgcttgcagatggaagcagcgaccggccaaggccgctgcgggactcacaacgaacggatggccgacaccggcgcgatggccgcggcacgcagcgccggcagcagtaccgccgcctggcccagcagcagcaggatcaccgcactcaccggcaggtacagcagtggcaggcgcggcagttcgtagaagcgcatcagggtcaggttcatcgcgtaggccagcagagccccggccgcgatgccgatggagacaatcagcaggttctcgatctggaaatagcgcatcacatcggtgcgcgtggcccccagcgcgcggcggatgccgatctgcttgcgacgttgctccacccagtaactggccagtccgacaatgcccagggcagtggcagccagcagtgcgatgatgacaccgcccagcagccccatcatgacccggtcaccttcgaaatgccgctcgcgcagttcggagatccggcggctgccctcgacatcgaacaccacgtccggcgcgacacggcggattgcctgctgcgcatcgcgcattacgtggttcatgtcgccggcctcggcgcgcaccagatagcggccggtcaggcgcggcccctgcgatgcgggcacgatcaccgaccagtccgagcccttggcttcaccgcggccggggcgggatacggccatgtgctcgaccacgccgatcacccgcagccgggtgtccatcgcccacaggctcttgcccacggcgttttcgccgggccagtagcgttgggccagctcctgggtgaccagcgccgggggattggccggcaccagttcatcggtcggtgcgaactcgtccgcaccgggcatgcgcccccccaccaggtgcaactgcagcgcgtccagggccacggcatcggccaggtagaaatccagaacaccgccgggcacctgctggtcctcgtccaggttgacgccggcgcgtatgcccgggctgccgaacggcatggcactgaccagcccggccgccgtcacgccgctcagcccccgcaatgcaccaacgacccgcgcgttgacatcgttggcgcgctcggcatcgatgccgtcgagctggatcacccccagccgtgactcgtccaggccactgaccagctgcattgcagcgctccgctcgatcatcaggaagatcgcgttgcacagcacggcgcaggccaatgcgatctccatcgcgatgaggaaggtcgccaggcggtgccggcgcagggccgaaagtacgatgccgatctgcatggtggttcctctacagaagcttcagttgggcgatgggctggaccgcactggcacggatcgcgggaatcaggctcgccagcaggctggccagcaccgacagcgccagggtgaacagcagcatggtggtatcaagccgcgccaggtccgcataggccaccggctggctgcgcaccgcgctcaggccgagccaggtcagcaacaggcccagcgtgccacccagtgcccccaccagcgcggcctcgaccacgcactgcaggaagatcgccgcgcggcttgcgcccagtgcgcgacgcaagccgatctcgccgctgtagcgcaggaacttcgccagcagcagaccgaccacattggcaatgcagatcccgaggaaggcgaaggccaggatggcctgcagcttcacgtcgctgggtaccacctggttgaagtcgagccactgcatcaatgagcgcagccgcgtgttgtcggcgtggctgatccggcccagggccttctgctcagcggcatagttctgcaggaaccgctgataggcggccaccttggcggcgctgtccagcttgacccacaggtgtacccagacacacggcgcggtctgcagccggccgcgctgctccggcgtggaccagcaggtgaacggcacgaagtcgccgtcattgatctccaggctggaggtcagcggcatgaacagatcatcggccgaggcgaagaagcccgacgtgttgccgccgctgaagcggccgccccgcaccttgtagaacagcggcgagggtcgccagggcgcgagcacgcccacgatgcgcatcgcggtgtccttgacccgcagtgtctgccccacactgtcgcccccaccgaacatctgctcgttgagctccgacgagatcaccaccacacgtgcgcgcgcgtcatcctcctcgcgcgaccaccagcgtccatgcgccagcggcaccgcgaacatcgtcgcgaagtcggtggtggtggagatcgatgagcggatgaccggtggcgcgctgccctgatcgggccgcagcttgaccggattggtaaccaccagtgtctgctggtccgcgcgcccggacgaccacaggtcgaaggccgagcgatagtccagcacgtcgtacggctcgcggcccttcgagttcggattggcatccagctgggggtagtagaggtcaccgctgcgcccgggcaagggatcgccggacagcaggtagaccacggtcaaggtggtcatgctggctccaattcccaccgcgatggccagcaccatcagggcggtgatggccttgctccgcagtgtattgtgcagcgccacctgcgcgcagtagaccagcctgcgcatgcccgcaccctttcctgcaccctgtatcgacttcatgtcatgcctctccccggacgtgcacgggcgtgacccgtgccggttgccacatggacctgccaagttcgtgtacgtgatcgaatcgggcgcggtaggcctcggcgccgtgcatgatcatcaccagcatgcggccatggctgcgtgcgaagatcgcgtccatcgcaatctcgcggctggccgtatcgaggttggcgaccggctcatcaagaatgtagaggtcggcgtcctcgcccagcaccatcgccagggcgatcttctgctgctgccctgccgacagggtttccggcaggctgtcggcgatcccgtcgccgtccatccccagtcgcgccagcagcaccggatcggcgccgaggtcgcgcaccttcagcggagggaactgcagaggaagcgtgatggcgcggatacgcgccggtcgcagcagctggccggcgacgggctggaagtacccggccaggacgttggccagggtcgtcttgccgctgccattgtcgccaatcaccagtgcacgttcaccgggtgaaagggccagggtgaaatccgaaaacacgggagtggcgccgtacccgtagccgatcgacgtcgccagcagaccaccctcgatgtgcgtggccgacgccgcggctgccggcgcggtcatgaactccgccacccgcaccaccaccacaccgtggctgtgcatctcggcaatgttcttgaagatgccgatgagcgtcgtggctgagcgccagaaggcgttcatgaaggcgatgaacgaacccagtgtcatctgttggcggaacacgaacagtgcgccgacgaagatcgagcagacatccgagatcaccatcgtcaggtcgctcgcaccctgcagggtcctcaccaccctgaagcgctggtaggtcgaatccagcacctcgcgcaggctgcggtcatgggcctgcaccgtcctggggcccaggccgaacgtacagaccatcttgaaggcagacacggcccgggtcagcaaagaaaccagttcggcctcgcggtcacgctccaccacggtcagctcgcggatgcgtcggccgaccagcacgctgaccgtggtggcgatgggaatgatggccatcagcaccaggaacgcacgccaggagatgatcagcagggctgcgatcaaggcgacgaatgtcaccgcctgggtcagggtggtgcgtgcgaccgacagcatcggcaccacgccatccttcacgtccgagcggatccgcgccacatagtagccagcccccttctgcaccacctcgtcataactgcggccatagtaggcggtcagcaacgaggtcccgatccgctccacgatgcggttatccacgcgctgctgccacagcgcgcagctgtagttgcccaggttggtcaccaggcacagcagcagatatgcaccggtaagcagcaggaaacgattgaaatcctgccggctggcggcctcgtcgaagatcgcgcggatcagcagcggatgcagcagcccgcccagtccgccgaacatcgcggtggtggcggccaccgcaaggtagcgcccgcggagggggccgagcaggatcgcgaagctggcgaggatggcgcgcacactgtgccgctgcgcggtctgctcgcgctgaagtggctgtccggccgggtgcgggcgcgcattcatgcaaccgccgcctgccccaccccggctccgtccacttcccgtaccaccgcgccatgcacatcgagtgcatccaggaagaactcatccggcgccagcgtgtcgtaccgatgcagggcgcggatcactccggcgatgccggtaccgtggtcgaaggaaatgcggaacagattctcgcccggcaccgccgccattccctcctcctcctcgaacagatacagatcgacgatgccctggtacggtcgctccgccatctgcaggtacctcgggtcaccggagtagagatgggcgtcgacaaacacatccagcatgcccgacaggccatacaacaggccgcagaagccggaatacttgcgatggaagtcatccaccagccgattcacgtcctgccacaggccgtaacggatcgcgaccttggcgatgcccgcagtcccctgctccagatagggttcataggtgttgacctcttccggtgagctggggaaggtggtcaccccggtctccagctcgaagccgtaggagagatcgtgtcgcagtgcctgctcgccaagcacgcgccatgccggatcaccactgagctgcgacagcctcagcaggaacagcgccacgccggcctggccgtaacccatgccgatgcggacgccaccttcgtcctgccagtaggcaccccgctctccgtggtggacggtgtctgcaagccgccgcgccagcgacagcgccctgtcgagatgcccgggcaggccggtcgcgtgatgcatggccaggtgcgccattccgatacccgccatgccgtgatacagcgagtgatgcgcatgcaacaggtcactgccgtcagcgctgtcgagcaggctgcgggccagttccacctcgccacgcagcagcgccgaccaggcgatgccggcaaggccggtgaggaaccccggcggtagcgatgtgcgatccagggctgttggcgcgcacttaaaactgacccaggctgcgcgttgaactttgacccacccggtgtacggggctgagggtatcagttggtggtctgggtggtggcctcctttgccctgattctggctttggtcttgttggcggcggtgctgttgcgcagccgccaggagtcgttgccggtctccaggatgtggcagtggtgggtgatgcgatccagcagcgcggtggtcatcttggcgtcgccgaacacctgaccccattcggagaaggccaagttggtggtgatggcgaggctggtgcgctcgtagagcttgctgatcaggtggaacagcagcgcgccgcctgagggggtgaacggcaggtagcccagttcatcgaggatgaccaggtcggcataggtcaggcgcagggcgatctgcccggccttgccctgggcctgttccttctccagcgcattgaccagttcgatggtggagaagaagcgcacgcgcaggcgatgctggcgcacggcctggatgccgatggcggtggccaggtgggtcttgccggtgcccggtccaccgacaaggacgacgttctcgggggtgtggatgaagtcaccctggtggagtcgttcgaccagtgcgcgatcaacgggactggccgcgaagtcgaacccgagcaggtcacgatggacggggaaacgtgcggccttcatctggttggcctgggcacgaacctgccgttcggcggactcggcctgcagcagttcggccatccagtgttcgggctccatggtgtgcaggcgcatcttggccagcagttcgggccactggctggccatgccgtgcagcttgagctgctgcatgcgcagcggcaggtcaggcgtcgacatgatctgcctcccgcagggcgtcgagtttttttcggccggatcggacaccggcggatgacgcagcgtcactcgcgaggcgaccgtctcgatcgtgcggtccggatgctgcaatcgccccagcacgttgagcacgtggtcggcgcgcaccaggccggactcgagtgccagttccaccgccaccagtaccgcttcgagcccgtgcacgggtacggcggccagcacctgggccatggcgcggtcgccgtgaggctggcgcagcaacacctgctgcagcttgcgcagcggatcgggcatggacaggaacggcgcgccgtcacgcagtgcccccggcttgcgctggaccagggcgatgtagtgctgccagtcgtagtggacccgatcacgctcgaagctgcgccggtggcgggcgacctcggcctcgccgaccaccacggccagttcgaagggatacacgcgcaggctggcgacggcgtgggcgtgttcgcacggcacgctgtagcggttgcgctggaagctgaccagcgcggtcgaactgacccgcaccggccgctcgatgtagccgtcgaagggcgcgggcatcggcatcaggtggggctgttcgtcctccagagcttcggccacggtgatgtcggaggcatccggatgcgcctgcatcggccaagcggcgcggcactcgctggcgagccaggcgttgagggtgtccagatctggccagtggcgggccccggcctcgatccagatctgtcggcgccggtcctgcacgttcttctcgacccgccccttctcccaacccgcggcgcggttgcagaactccgcggcgaacaggtagtggctgatcatggcgtggaagcgggcgttgacccgccgttcccggtgctggccgatcccgtccaccgccgtcttcatgttgtcgtagatgccgcggcgcggcacgccaccgaaggcggtaaacgcctgggtatgagcatcgaacagcatctcgtggctctgggtgggataggccaccaaccagaaggcgcggctgcaggccagcttcacgtgggcgagatccagcggcatcttggcgtggctgccgacgaaggcgtactcgcggctccagtcgaactggaaggcttcacccggaggaaagtgcaacggcacgaaggccgggcggcggctggcgccgccggccgccttccactggcggatgaaggccgtcacccgggtgtaggtgcccggatagccgatcgcctgcaactgcgagaacagcaccttggcggtgcgttgttcccgccggggacgatggctgtcggcacgcagccacgtctccaactgggaccggtagggatcgagccgggagggcgaggctcgcctgggatagaccggctcggactggccgctgcgcagccatcgccggatggtattgcgggataggcccgtgcgcttggcgatctcgcgcagcggcaggccatcgcggaaatgcatccgccggatcttggccaacatgaccatggtgatcactcctgaaatcccccgagcaaaagatgctcaggatgtgggcttcaggtgggtcagttttacccgcgcatcaccgccgaaagtgggtcagttctggatgcgcgccaacaccgcgccctcattctcgaccgctggctgcccgaaggcgattcactgaagctggtgcagatcgtgcgcggcttgcgtacctggctgcccattctgctgttggggcgccacaaccacgctgccgactgcatcgcctgcctggatgccggtgccgatgactacctgcccacgccgttcgagttcgacgaactggccgcgcggctgcgcgcgattacccggcgcctcgacgctgatgccggccacattctgagaatcggcaatttcacgttcgatttttccaaccgcatggcattggtaggcggtgcgcccctgagcctgccgcgcagccagctgctgctgctggaagcgctttgcgcccgccagggccggatcgtccgccatgaagtgctgagtgctgccgtgcacctggccggcgccgacggcggtaccaccgtgttggatccgcacgtgtcacgcctgcgccgtgccctgcgctcggccagtgtcagcatcgagtccaagcgtgggctgggctacatgctgaacgacgacgcggcctgatcaaaggccatcggcgcgggccgcaaatgcaacagccggggcggtaaaccgcccaggctgccagtcccgctgattgggccgaccgctgcggtcaggcggccttcattgcgtgctttcgcgcacgcatgacgttgtggcactcctgcacttccggaagcagctgggtcacttcctggcgcacggccggcggcagctcgttgtcctgcagcacatccttgaacgcgcccagcaggcggtcctcggattcttcaagttcagccacgtagccatagttggtgtcaccgaaagcggctcgaaccttgccgtagaactgctgcatcgaaccgaccacggtgccatgttcggccggcttgccaccgctggcggccactgagccgctcaacgccgccacgatgcggcccttgacgccagcgatgcgggtgaacagtgccgacagctcggcatccttgaccttggtggccgcttcttcatagaacgacttgccatcgcgggcgatttcgatcaggtcgttgaggcgatgttcgatggtggactgggtgctcatggcgtcgctcctgtgtgctcgaaagtcagtggagaatggcagtgcatctgcattgccttcgaccccactgtgtgcaatcgcgtgtgccaaccaggtgagcacgaattgatgcacgcatcaccatgcgaaacacctgctgacttcgtcatttcaagcatcgtcggctttcacggaatctgagcgcgttgcacgcgttaccacggtgcggtgacgatgatcagagtgaccagcagcgcgattgccaggatcaccagcagcacgtgccattgcttccaggtgggtctcggctttccaggcgtattcatcgatgggctcctgcgcgggcggggaatggggttgccagactgaagcgcaacggcatcgcacaacgtcgacgtgaggtgcacgtttcgtgcagaccttgctggaatatcgggccgcatcggccttccgcacccgtgcctggcggcatattcaacaagtaccacacccgacaccgccagcaggctgccacccagcaccccatccgctgagtgactcacccagcagcagcaccgccagtgcggtggtcacgatcggcaccaggctgaagaatcccgaaacgcgcgccgcgcccaaccgcgaaagaccggtcatccagctgaggggtgcaaggatcgatgcacacaccgcagcgagaccgaaacagcccaccgcggtcaggttgttcactccggcagctgcaccggcagcaggatcagcgacgccgccgtggcctgcaggaacagtgactgcagcatcgtcagcggaatcttccggcgctgcatcagcacgatgcaggcggcaaatgcacggccgaatccgtggccgagatcgcgcagcggcctcacatgagcgtgcgcacgctggagcgcatggcgcgcagtgaactgggcatgtcactcggcggccggcgtgggcgtgtgaagttcgtgcgcgccaccgaggcgctgtgcacacgcaagccgatcagccgcatcgccggggagctgggctattcaggcgtcagcgcgtttgccgaaatgttcaagcggcacgcgcagtgcacgcccgatcagtatcgggagcagcatcgggccgggtgaaggcccgcatcgagggctgtcgatttcccgccccgtcgctcgtcggaacaggaaaggcaggcccatcggcctgcaggagcgctccaatgccgccgatcctcaccgccttcgccacctcccccgaccgcggccagggcctggcccgtgacatgcgcgtgcgctgggcgctggaggaactggccgtggcctatgacgtacaactgctcagcttcgccgagctgaagcagcccgcgcacctggcacggaatccgttcgggcagattcccacgtggcaggagggcgaccggaccctgttcgaatccggcgccatcgccctgcacctggccgaacagcaccccggcctgctgccgcgcgatccggacgcccgcatgcgcgcgatcatgtgggtgttcgctgcgctgaacacggtggagccccccatcgtcgagcgttccatggcctgggtgcttgagcgcgagcaagcctggtacgcgcaacggctgccaatgctcgatgagcgggtccggacgcggctggcccaactatcgacgtggttggccaggacaacgtggctggacggcgaattcagcgtgggcgacctgatgatggtctcggtgctgctgcgcctgaagagcagcggcctgctcgaccagtacccacttgtcgccacctatgtggcccgggccatgcagcggcccgcctaccagcgtgcgtttgctgcgcagctggcggttttccaggacgcctagcgctgcgcctcctcccaggtaacaaggggccagcagtcacgcaggccccatgcgttacttcaatcgacgcgatctccagttcaggtaaccccgccagccaaagggagcactaaaaagcgcaaccgcaccgcacgccagcaggccgttgaacatccaaggggtcagctccggggaacctgccgacatggatggaaacacgaacccgcatagcagtgctcccacaaaggaagtaccgaatatgaccgtggaacccaggcctggtgaaactcgcatcgatctattcctcatcagttccggttgcaggtcaccttgacctcggtcagcctgatcgtgctggtgcaggtgacagactgattgcccgcccccgtcaccgggacaccgatgttgttgagcgcattgacgaagcttcccatatcggtggcattcccattcgggaattcgaagcgatgcgtaacgccgcctcgcccctcgctcaactgtgtaacgctaagcggaatggagttaccgaacctgtccttgtaaaggagggcgttgggctcccagcgacggttgatcatgctgtagttgtaggaagcggtagacccgtcagcatagcggatcttctgcggcgcccagacatcgatgccaagcgagtacgcgccggaagccaggtagatgtaagtctcgaaacgctgccccagatgctggctgaccgcatcccttctctgcggattctggatgtcatcgtacacattggtcgggtagccgggctcagacaggctgatcaccgattgagcgacgatgcgcttgaactgaagatagttgatcgccggttgctcgaccgggagctcgtcgatgatgacgaagggttcgcaatccatcgcgccgggttccattttgtcgcaacggatgccgccttcacgatcacgcatgacgctgaactttcgtgccatgttgcccgatggattcagtatgtagaggatcctgtgcgacggcatgctcatgccgtgcgcgaacgactccgccattccctgcatctgcgggtaactgcaaccatcgcagtctcgagccacgacctgctgggcatgcgcctcccctgctccacccaaccacgccatcgcgatcaaagccgacgcaccaatccatgtagccacgttctttcctgccactgcttcatatccctgaaatcaagtgagtccagacaaggtacgtggaatttcacaaatatgaaagacacttcgtgagcatcgcgcgccacacgcgatgtcactaccgctttgaaggattgagagcgcttgccatacccggcacttctcccgcagcgacgacactgtcagtgcaacctgcgccggcaggcggcctgcaccagcatcagctgcgccaccaggaccagcatcgcgcagcccgacagcagccaaggatcgatgtaccactgttcgttgaaactgaagtcgccggcggaaatgcgcttccaaccgttgaagtgctgcatcgccgccaccacgaacgcgaaggcgcccgcgctgtacgacagccagggcaccacgatgccgcccgggcgcgcgaacagcgtcagcaggcccagcacgccgatgaccgtgcgttgcacgcggcaatatgggcagacataggccatcccgctccattccaccgcccaggccagcaggctgaccagcacggccgcggccgcggcggtatacagcatcgtgggcgtgatcgtcctgcctgcatcgtgtgccatcccgcgctccttcgttcaaagaccccggcagggtagcagcgtggcaggttcaatccttcttgaagaccgtgcgcttgccgatcgggctgcccttgcgcgccgtcggtcgcgccaacccgggaatcaggaagtcggtgaccttgtggcccttctggatcctggaagcgagccaacgcggcatgcgcccgcggccggaccaggtcagccgcttgtattccgggtctcggtatttggcggccactttgccggttctgcgccgtgccggtttccggctgggtgcgcccgcttcgatggcttcatcgccaaagagttcttcgagggtatatcccgcttccgccgcggcggctttcagcatacgccgcaccgcgctggcaggacggcggttggaaatcagctgcttccgctgttcagcggcaaccaccaaggcgcccagctcccgcaggctgagcgattcaatatcgatcgtcatgctggaaaggtctactgccgcgcggcgcctgtcaaggcggcttgcccccgcgtagacacgggtttcactgcgggtgggctccgatcgccttcgtcggccatccccgaggacatccctgtgagcacctcatcgcattcgcttgcctacctgcttgcgcgcatcctgctgatggcgctgttcctggtctccgggctgggcaagctcggcgatctcagcggcacccaggcctatatggaagccatgggcgtgcccggcatcctgctgtggccaacggtcgccttcgagatcggcagtggcctgtgcatcctgctcggcttccagacccggctggtgtcgatcgtgctggtgggcttcagcctggtcaccgctttcatcttccaccacagcttcgccgaccagacccagcagatcatgttcctgaagaacctggggctggccggtgggttcctgctgctggcctgcaccggggctgggcgctacagcatcgacgggcgcggtcggcgcgggtaagcctcgattcggagtgtgcacccgctagcggcgaagttcggcctctggcgccagcgtgtggatcaccttgccctgtgcatgcaggtactcgatggcaccgtaaccctcggccgtgagggcccggccaggttgaaggcgcgcttgtactgcaggccatcgatgatcggcgccagcgtcttgacctgggtgattcgccagcgtcggacgcgaatgcccgaacgcattgcgatgcagccagaacgaagaacgcacaagcactgcgcatcatgcgatctcctgtcgggatcggaatcaacatccgcacgcccagcacgcctgtggtcgacgaccccgcgcggtgacaccggcatgctggcgatggatcgacaccatcccgtcaaccacggccccccgacgtcggccttccccctgtgcacgccgccggatacggaaatgatcccggcatgcggacggggacatgccgacaatgccctggaacaccttgcggaaggcgctcacgtcgtcgtatccaactctcactcgcgcggcgctggattacctgtcccgctgcgagtccgcaccgtcactcgaattcttaactcttcagaattcgaccaagccacctttgtcccagatggcccacaaaacagcatgatggcgccctacggattcagggatttcgttcatcttcatgcgtgacatcggacagttctacgtaatcagcgtcgagggagtgacgcgggcagacggcaccctgctgcaggtcacccgaatcgattgctcctgcatcaagtgttcctggcagttcagggccattcccaaccatggccttgtcgatctcgacggtgcggctgccctcagttgcccaacctgcggcaatcaccagtcagtcagccgcgcacggcttgaagagctcaatcgacgcagcgacgaatagcctgcacttcaaccatccatcaacacagcaccgacacgaccgatacccggtgggccctatcgttcgtcaacaagcaccccccggcattcccatgagtcataccggcatttttcagatcaccgatctcacctacaaggctggggagcagggcgacctggcccgcgcactgcagatcgtcgccacctgcaccgcctgcggatcgacgagcgtgtgggacgagcatgagatggaacacgttgccggtggaaccgtgctgtcatgccgtggctgtggtgtccgccaggccatcagcaacgcgcgcctttctggctgcgcttccgacatccgccatccgcgccgctgagcggcgcgcagttcgtactgcgtagccgccggcaggggcagtcgttcactcggcttttacaacgctgcgacgtttcaagcgacaacgcgcactgatgcatctgcctgcatccaagggccgcgccagcgcgtatgtaggatgcccgcgccttgcgggcatcctatagaggaacgcgccgtgaaagcccttcagcggatagccgccacagtcagcttcgccgtactcgtctcagccacttcaatgagcttcgccgccagtaccgtgatggtcggcggagcggagatgtatcccaccaggaccatcgtccagaacgccgtcaactccaaggaccacacgactctggtcgctgcggtcaaggcagcgggcctggtcgataccctcaatggcgccggccccttcaccgtcttcgcgcccaccaatgcagccttcagcaagctgcccgcaggtacggtcgatacgctggtgaaacctgaaaacaaggcacaactgaccaagatcctgacctaccacgtggtgccaggcaattacagttcagcgcagctgatggccgatgccaggaagcacggcggcaaggccacgctgaagaccgttgaaggtgaatccctcaccgtcgcactgcatgacggcaagctgtgggtcatcgatgccaagggcggcaaggcggggatcagcatcgccgacgtcggccagtccaatggcgtgatccacgtgatcgacacggtgttgatgccgaagtagttgcaagcagcaggacgtccacatgagcggcagccgcatggcggctgccgccgtctcctcccatgaatcagcatcgcggctgcggggcgatgacgcgctacctcatgtatcaggagcgtgcagcggcgttggggccttggtatccctgtcagtcagaagggggccttggattccaggtgattgcctgacgtcgtagatctcgcattcggttgggtccatcggttcccaatgctggctcgccagctcaaagaaggcagcgggtacctccatggggaacgttgcgcctttctcgcgactgcgctggcggacgcgatcacgacgaatgtcatgcggggtatccaggagatgcaccaccagattgtgggccgcccccctgacctgcgcgtcgaagagggtcttcgtaccaactcgagaacccacaggccgtaatactccagtggtcaacttagaagccagccaaattgaccatgagggaagcagccatgcaactggaagacatcgagcgcataggcgactacgtcatgccggagcgccctgcagtacgcgcagatctcgcactgatcttcggaactcggcacggagtggaggatttctgccaggcagtagtcaccctgtggcacaagagaatgttccggaaggcagtcgtttccggtggcatgaccgcaggtcttcacgattcagaagccgaaaccatggctacccgcctcatggagttgggaattccagagcatgtgctcatcatcgagccgttcgccatgaacactggtgagaacgtatggcgctcgcgcgagcttgccgagcgcatgctgcctctcgaagagagacggagcgtcattgccatcggaaaaatctgttccgcgcgtcgatatctgatgacactggcccgtcattggccagggccaatcgttaccgcgcagtgggtcaactatttcgcggtggacaagagtgactggcacctggatccggagttcgccgaacgcgtcagggccgagtacgtgaagatcccgcactacataaggaggggattcctgatcgagcttccagaaagctgatccaggtgctgccaaggcacgctgcacgcatcacgccacgacgccgtgtgctgttcagggctaccgagcggcaacaccgggcctgaccagcccgaagtctctcagcgcaacgtaaggatcccagtactccctgtaggccattatcttgccgctttcgagcgttaccatggagatatggtcctggcgatagagccagccggcgtggccgcctccgtgtactctccgcgcacctgccggcgaggaccaaccattcgtttcttgctgccttccttgtcatggcaacaagtgtccattgcctgtcgatgcgcagtaaatcccgtggaaccctatcggcgtccgagaattatttccaatgttctttccgccgacgcggtagaggcatcgggcccgactgttcctgaaagcataagttgaccgccctagggaagcaaaaggtgtccgccggtgggtacgcgctacctcgaagaataatgaatcgaccggatacgaagccagccctttcagctcaaggcagaggaaagaatgaatgccactccggcactggctaacatacaggcgcagagataggggacaccaaagctccaggcttggagctgcaactattgagcgcgctccagcacccagtcgacaaagcctccactgatgaccatatcaacaatcttcctcagcccgagcacgtcgacattctcctgatcggaccttatctcttcgccggtgtgatacacgaagaacattctgtcgtactgccccattttctcgttatctttcaagtagcgattgaaaaccccaacgctagtggcgcacttgatttgcacccaggcggtttcgccggtgacaggcatttggagatcaagatccttggtcttctcagtactcccgactcgccccaaacgcctccaccccgccgcaagaaacatcatgtccaccagcgtttcgaagtccttgggatcgagtcgctggacgaccttcccaagtgaatcccgcagatcttcctgtgccgtccgaactcgttggatctgcggatctaccgctccatttatcctctggatgaggcgagccgcatcattgtcgctcagatcgaacgaagtacctcggaatgacgcggcggcggtgatcgatcctggcaggcttctcttcgataactgaacacccagctggtcgcggtcactccatcccccggcgatcttgcgagaggtactcgtcgacttaggattggagggcatgtaaatctcgggcacaccttccgcgacgaagccccaatagaggcggtcatgagcaaaagttacccataagatctcaccttggtcctcgaaatatgtacgagtctcattggtaaaccgcgtagcaacgccttttgctttcgaaagtgcccagtccttcgccagatccgaccatcgcgcctcgcgacacatcctgtacgtttcgggacttccggtatcgaagtcgatgagcaacagtcccttctctatcgcctcatcttcccagcaacctttaggtccgagcttcacgtagcggacgcgggtacctagagcgataggcaggatgacgctagatttcatggccgaacctcccaaggggttgcgcattctgccgcccccgccttctgttggctatgggcccgacaggcaccaggccctccaacagtccagccagtggcgcgtatatgctcgcgggacgcgagcatctagatccccccaaccccgtgaagccgtggtcccgatcaacccgccctcacctagtgccgcgtgatgtacgacaggagaggagtcggctcccaagggtcgctgaccacctcttgattcgaagaactagtagacgcagcgtgtagcgtgactccttatacagagcccgcccaagcctcccatctgagtagtccatggcaatacagcagccgcgctcacgtccggatcgccgatgggagcgccactctgggtatcgcgcttcaactgtgggtagccctagtggacgcacgcaatgattcggactttatgcatggtccgcttcctccctattgatgcgtttactgcctcgcgccgagcgaccgcacaagccgagacagatacatgtaaagtaggccgtagtagagccaacagggggctaaggaatgctcgtatctcgctatttcaagttggggcgaaatcaggcaacactcgattttctcgatgtccacatcgataaagacattcccgtcttcgtggacccagcttccctgcgttcattgcaaacagagtggggacaccactgtatttctcttcttcagagctactttgagtccgtcctcacggcaatccgcaaggaaaatcacgatcgagctaagcaacttcttgcttgcctcaacgagaggaacgagttccacataggatactcaaaggacaggtcccgtggcagcgctctaggcgcggtatccgcggagaagatctgggagtctttagtgaagagcaaggcagcagtgactggcgtgctccacgaccttgaagacacgatcctgtttgtggacggcataggtcccgatatgctctcagatgccgtttgcaacatcattcgtggcccgctgatccagtacacgcagcaagcttgcaattactacggcattccgctcacgccgggggtcgattcaggaccgatatggaacacacgcgacgaaaaatgggaaagtgacctgattgagctgccaatgacagaacacggatcactcatcctgatcccgaagatcatcgcgcgcgtaaaacagacctatggccaccaagagtactaccgccacttcttgatgcctgttcttcagcagcaccacaaagatatcaattcgtcatttgtgcacgttctgaaaggcaaaaatcacaagggcactaagaaggtttacaagaccgatctttatgacctatacggcgccgacaaactggcctctgcccaactgaccggcgagcaccctcaagctttgacgaagtaccgggagacaaagagcgcagcgccatcgcggcctcttgatcatagcgcgcttgcggcgattgagaatgcgcctacgccaaacttcgacgcactactggaagatgtcacatcacttgcccccggccacaaagaagcctcggcctatgagattgcgatcgagaagctcctctctgcactgctctaccccgcgctggcgttcccggtgaagcaggacaaaattcatgagggcagaaagcgcatcgacattacctacgtaaacgatgctaaagatgggttcttcagttgggttgctagaaatcatcccgcctcccatgtcttcgtcgaatgtaagaactatggcaaagagattgggaacccagaggtcgaccaactggccggccgattctcgccttccaggggaaagctcggcatccttgtagtccggtctgtcgaagacaaagccctgctgctggagcgatgcaaggacacagccaacgaccagcgcggcttcattctcgtactggacgacatcgatctaaccaagttgattaagcaacggcaggcactcatgtacggatatggtgagacgttgttctatcaacagttcaaggcactcatctcatagcctcccccacggcacacaccactgcgagcagcccacaacgcgctggtcgtacagataccgcacgatgcacagatacagcttgccctgctggggcttgatctcggtgatatcggtcaagctatccgggcgaccagtggcgaggacttctggcgcaccgagacagtggcgtgacatagatgcccgatagtgggacgaaagctgcgaatgcggactagtccaagtggctgaggcagccgccaacgccggattcgagtttgatatatttatatcttacttttcaacaacttgcgtcaatccagcaatgggtctatacaggttcaatcagaccggacagagcgcgactaagcatgccaggctctcagatccctcccgcaccgccctcttccggctcgttctgggcggcaccgctgcttggcgtaaccgtccccgacagccccatcttctcagcggcggacacagccaggctgttgggcttccccacaagggaggccctcgcaaaagcacgccgaaccggacggctctctataaagatgttccagattcctggaaggagaggctggttcgctcgtcgcgaagaggtatgcgcctggctacaccaatccctgaacagcgaggaggaagcccgatgagctagcgaaagcacagcccctcaatagaaaaggccgcacatttgcagtgtacggcctttgatacggcaaacggcttctcgagactccataggtgcggccgcgcgagaaacacccattttggcgtcgcggcgtttggtcgatcactagattctctagcagtctcctccgtgcccggtgcaatcgatcaccatcagcggcttcaagccagagatctacggcacgaactggctggcgaacaaagcgacacacaccatttcaggatcggcagacttcatcacgcccccttgggctggaacgtggcggttagttttcgcacctccgacgcatgggtgcgaaatgccgccgggacgcgcacccactattttcctcgcataatatcgacctgctcttgaatgtactgatcaaggcgggcttcttggtcggacaatgcatcccgcagtgcctgcgtctgccgaatgaaattacagtacttatctagagcagcatgctcgtccttttcttccgagagcgagcgaagacgcctcttccaccctgggattggatctaccgtggatggccccctgaagttaccttcaagccacgtcgccaatgctggcccctgaaccagtctcccggtgtaaccatttttccttgcgtactccactccctctacggagaaggcaagcggccatacctgcgcatcaatgacaacctgacgacgcgagtattcccccctgcggggagagttggttgaaacaaatttgatctgttcgtccgcttcgtcgatggtccgggacatatcccgcactaagtccgcgatcatattgcacttcatgtttacggccacaacccgaattcgcttccaagctgcctcaaagagctcggcagcgtcgaatagcatccgaagaccatcggtgtgcccaaggtactttgcggcccggtgggatatggtttgttgggaaccgtaactccagctggatggcttgtatgccaccagcagatcacagcaggttaccaagtagaagttggcgagcgagtgcaatattccttcgtgccgcagcccagcatggtaagagctattccggaaggagtgaagccagtttattgaacgactccacggtgcagtgatgagtcctgtttgtagcgcgagggtcaccttcgcatcaaagtcttgacccaaagctgcctcaagaactcgatcattgactctgctctcagtgtcatcgaaccaccggcttccgaagagcttcttatgcctggcgtactgatggagagccagctccacaacgttgtccacaagcatgatggcgaagcggtcgaagttcctgtccttcaatgcaagctgatcaagagcaagatccagctggtcaatgtgatcacagagttcgcgaatcatccccaatgtcccctattgcgtcgcgcagtcactaacgtagccgacgctttatgatttcgatgatggatcccatcttccgcgcacctgcccccaaggtaggaaggaaagctgcctccaacagtgagcccccatcccataggtgttataccaaaggcaactccccgactttagcggtcgccaaaattggatccatgctgccagtgcaaggttccgtgctaagcccttcgcgccaggcagatgtaggaggggtgatccgcccctgttctcacaggacagttggaggggcgcatccgcaatgtatgcaagtcagccccactacggccgacctttcgtcaacacgatgttgtctaccagatgattcggctgccaagggataggcctgccccgaactaatgggattgccacctcatggttgtttcaccatcataagttggccaaagcggacaccttatgccaggaggaacaacgacgcccaagcacctgcttcttatggtggcccaccagcaaccacatagatccaataagccattgatctagcgggcctaatacgtacttcaatctactttggactcacaaaacgactcacttgccccgtggctagtcggtgcctgcgcttgccatcgctccaaacgtgaagagactattcaggaagatccagcggagagtgagcatggcgagaaagaaggagatgaccgattttgagtatctggaaagccgtggctggggatttgaaatgccgatcgacaagtcacatttcactgccctacggaagctggaaggaagcttcacgggcatgggcggcgcaggtgagtcggatctggttgagctgtccccgaagaatgtgatcttcgtggaagatcacttgaggcaggccaaagctcatcacgcagaaggtagcctggaggacgcgtggttccatctgctccaggcgagcaatgcactggcgtatcaccgaggcgtgcgcgagggccgattccaggcaagcaaggtcgatcggtcggttcaagccgggaagaaagggggccgtgccaaggcggccaacgtctccaagaccctcgacggcatagcaacagagctgcttgcactacatgcagtggaaccgatgcggagaattgctgatttcgaaatcgcagcgctggagatcggtgagaagcacggcatggcccgcgatcagaccgattggcttgcgaggctgaaaaagcgatccgcaatgctagcgctggtagctgaactgcgtttagcacgatagctgctggccccctacgggggccagcatcatcttgcctactcaacgcattggacaccgccgtagggaccgccggaaccgaacgtccggatgcccttggcggggcggaagcggaggtagtagtcctgcttggtgaggtagaacatcgcgtcctcgacgttagcccaggccatatcgtcattacgcgggaccatccctatgccacagcgttcgtacgcctccttgttcttgttgcagctgaagtacatgccgttgccgccggtgacagtgttcttccagtagtgccccaatgcgtcggcaatagtgatgtccttggccagttcctggccattgaagaagatggccatgtggaagtggccgcccttctccaaaccatactcaaggcgccagatgtagccagcgagatccttcgaatacggcccggtacggaggtacgcgacaaaagcgtcacggtggcgctgcacctcactgataggcagatcctgagcgcagaagccgagattcgtcagggtcttcgagaagtagcccaagtccaatcgaatgatcaacaacttggagtagccctggcgcaactgctgcagtagcttgcgggtgctgcggcggttcttgcgctcagcgcgacgcatgttcgccaacgcaggccccaatgcggcgcccttagagaacgcgcgcattttcgccacggcagcattgaggggcgcaacatcctccgggaagagcttcccgctgcacttgaagcgtacgggagcgctgaagcgcttgaagatcgtgaagagcgggctgtggcgatggacggggaagtgacgcgatatcttggccaagtcagccttcaggcaggtccggaactccttagccagatcatcctgcaggacgagacccgtggcgcccaccttgaacaggtcacctttgctgcgcatcagccttcccatcatgtctacgatcttcttcacggcatagatcgcggtctgctcgccggtgatgacgggccggccgtcttcgtcccagatgtacgttcgccgcgtgattgaagcgctgtttgctgcgatacccatgcaagttcttccaattctgttcgttgataacaacgttcattcctgatggcagctcgtcgccatttacagggaacgccacttaaaatcggcctcagtaggaaccaagccgacatgctgattgcgaaagttagagctccttagccgcccacctcccgcgcctggatgaggctgcgcacgtagtcatccacctcgtgctcaatgaagcccacaaggccgccctgacgaacacgcttggggaaggacggcttgaacgaaggcgagttctcgttgcaaaaggcgtagaaggtggagcggccgagcccgaggcgcttctgtgcctcttcacgggtaatcacacgaagcggcttgttgctagcgagcggcatttcctgttcctcatctggttgcgacgaggggagcttaggcagccagaatcgagctggggagtgcgctagcgatggtgatttttttactcaagcaattcgcaagtcattgatttaaatggatagaattgcgcccggcttcgatatgacgcccaaaggaaccagattcatttgcccggaaccaagtctcggcggggagggggagcttcacgaagctccccctatcgctttacctgagctcgctggtcaagaagccagccatgaagaccaccgcgaaggcggccaggtactcgaggggggaattggatcgttcgatgaacacgataggctcctagtcagtagggagccggcattgcgccggcatagaggagaggctgatgcccctccctatcgtgttatgggtttgaaattcgtttgcttggccgatcagccaggacgtgattcggccttgttcggccaccagggcacggctttgacggccggcgtcggctcgacaatgcccactgcggcccgcagtaccaccggccatccgtgcccatcgatgtagtgccggataccgttctggcgcaggaactgcagctgacgagctttttggggcgtccgcgtcagcgccttgatctcatccttggtgaggcagagcttttcagacatttcagacatccttgctggaatgccaagcaggcctaggcgcgtcgagtcgttctggcgcccccactgccttacgaagaactatcacccggttgtattggtcgacctgatggggaattcgattctggcagaaaaaggccaattgcctagccctgatcggggtccgagtgatctcttcgacttcagcgcgcgacagcacatccccagtcatcgaatgcccccaaatggccagtgccgatcatgccccagggcgctactctcggctacagaccaaggagaagccatggacgagttaccagccgcactgccgcttgagcagcagatcgccctactgaggcagcagctgaccaccctccggatcgacctttctggcaaggactggctgacggcggaagaggcggcgcactactgcggcgtgtcagttagccagttcaatgcgagggcgcacgaacacgacctccatccacgcaaattcatggggaagaagctctatgcgaagacggctctctaccaggcaatctacggcgcgaaggcttggacgcgtccatccgcaacctccgcaccaaccctaactgcgacctcccctgagatgaaggaggcgcttgcccggctacggcgctatgacgagcgcaaggggaaacgctagtgccccctcccggcaagctgatgaccgttgcagaagcggctgagcagagcgcgtgctctgccaagacgatacgcagagccattgatggcgggcaactcgccgcagtgagactcgggcagagtgccaagtcggatcgcatacatagagaagacttggaggcttggtggaaccaatgccgcctgcgacctgtagcagctcccagaatatctatacgtgatattcccccgccaccactcgatgcggcggaggcgagactcgagaagaggctgggaatcagtgccaagggcaagacggccccccgccgacgctgagcaaagagctgcaaaacgccagcaaggtccggcaatcctgaaggccccgcccgcactacgcctagtcttggacctcggcccggaaggcgatctcaatcagctgctcggggaatgccaacgccgagactccgatcaggttgctggcaacctgcggcacaggctggccatacacggccggccggaccttgccacttgccgcgaaggccgccggaacgtcgatgacgaacagcgtttcctcgaccacatctgcgagcgaccctcccagctctgccagcagcacctgggcgttctcataagtccgcctcatctggacttccatggtgtcgaagttggcgggcttgccgtcagcccccagctccgccggcgcaaccagctccccctgcggcgtgtgcgagagctggccggacacgaagatcgtgtttttgatgcggacggcctgtacgtacccgtaggccgattcccacggcactccgaagctggcggtctttcgattggtagcgttcatcattgctctctctggtgaaagggcaagtgtggcaagcagtttgagtcccccgcctcccctgaacgggggatcagattcgagcgcgggacagctgctctctacctgccttgacccacgccttcatcggatccctcgccctgggcttggtctccttcggcggtcggcgcggttccagcgcttccttgatccgcgccagttccaactgcccggcctcggctaggcgccgggcctgttgctgctgctcacgagtcggcggcaggccgggcagtggcgggagcaactgaatcggagtgctgtcggtcagccgggcgacggcctcgcgcagcggcagctcgggatacagcctggcggcgcaccagcgctcggcgtaccgcttcgcctgccggatgttggccgcgcgcacttccttcacctgccacatcttctggccttccatccatagccggaccccaggaccgtcatcaggcgtgacgctggccgtctcgcggccgttgtaccagagcgcccagcgttcacccgtctggacccagccagcggggatcggggcggtgcggaagctgtgggaggaatacatggccggaaggatacgaccggccgtcgcagatcctgcgatgacggtcgacacttcagcttgctgtgatgaagggttcactctgaggggcgcacactgcggtctcgcggctcttctccggtgcagaatcctttgctcccgtgtccagcccttaaacggcacggccatgcaccctcccaacgccttcaggatccattcgatccttcccctgcttgcgctcaatggcgcgatcatctgcttggagcaggtgcgatcaacctgtaagaactgtggactgaggtcctcaatggctaaggacgcaggctttcacacggatccgaagggcaccacgctcacgtgcccagcttgcggcgccacaggattaatggatgaaatggagatctggcaccactggcttgaccagtgccgtcgcgaacgactgttggcgcagttcgatcctacgcctgacgatccgctcaatattgaggacccaaaatgaacgatgccatctccgacctgctggagcgtgtgcattcctgcgaagttgcgatagaagtccaccgcggctatctgaaagccatggagtacgcgctgcggatttcggtgttgacccatcctgctcccgagcgcctaaacgatgcgtggctccagctactacccagcatcgctgcgaggcacaaagaggatggcggcgagctctttgcagccgccttcgagcaatcactgacagttctgaccgaacagatcggcgacgcccgcgcctgatcttcactcggctggtgccggcgcgtcgcttctcacgcgcgctcgaccggacccgcccacgcttcattcccgttcggtcggggagcccacggcttcgtgctcgtcctgatctgtatcgcttgcagggatggtgtccgcagccggacggccaacgatctcttcctgctgaagcacagcgtgcatggcttcaagggcctgccggttggcttgcgcgcggtacgcgcgttcgactcgtcccatttcaaatacggcaagaacaatgcctaggataaccacgacggcaatggtgctcttccaagggaacccgtctttgcggctgggcttcttctgccgcttcggcgattcttccatgatccagtccggccatctcggtcaggggctccaaggccatgctagcgccatggagcccacttggcaccaactatgcggcaatagcgtacggttcgaccaacgcggccaagaggtccatggccgtagcgttggcatcgtctgcatcgccgcgctggttgaacctggtccagtctgcgcgggccaatcgccgcagctcgtccgattcaacgggtagccacttcattggccagaacggcaagcggcgttgccccaccctgcccctctgcagctctacgatctcgttgtggctgctggcgcccagcactctcgaataggccactgatagcccatcctctggcccctccaggtactggaggaagcgttcgccatcgaagaggagcacccccgtaaccccagcattacggttgaaccgggccgcgtcgtccacaatctgatccaactttccgttggacaggcccagcttgtcgccggcgatctcctcaccagcactgctcacgtatacaactgccctgatgggcattgcgcacctccttgatgaggcacgaccctaacagacgcgtaaaaacgtttacgtgaggtggcgacaacttgcacaacaattcaggaaagcgtgatgctgaatgcggaccttcatcacaagacggaggcagcgatcagggcagcatccccaaaaattcttggtacaccgcaatgcccgatacaggccttttctacgttcttgatcttgatgcagtacgcgaccgcgatggcaacctcgaccgcgtgaccgcaatcagtgtccgctgcaaccactgcaagcacatcacccatgccaaggcgccgcagctggagaccatgccaggcggcaccctactcgcatgcgcgggatgcggcgagcggcaggctgtcagcaacgtccgcctggtcgaatgcgaccatgttttggggcacacgtcacccctcgccatgccggcctgactcgcgccatgtgcggccgattcgtccagctccccgttgtcgactttggccagcggggctggcgcggctgctttcctgaccgatcctagcgtgctgaaagacgcggcagtcgacgcatatcagccgtctacgccagccgcatgcaagcagcctcgcacatgtgccctttcgcgcaatcgagcgccagttcgcctctgcgccgactttgttgcctccccaaaatggactaacgcatgcgcagggttgtcatccatctgatcagcataacaagcaaggccttccgccttgcactcgccaactgacaccccccaaactcctcccgaccttagacctcgtccaaggtatgcctcaaacgccaactttggctccatgatgctgtttcggtcgacagacaggcttccgctatcaccactgttgggactgaaagcggccgatgaggggcgcccttcttgaatccattccgggagaacttggcgaaggagaacttcatcgtcatcgtgtagcatcacagaatcatcaattggcattatttggcctcctccgagttgactcttgaccagacccttagagcgacgccgcccaggtcctcggcatttaggtatatagaatcctcgacttcaccagcgccttccgtgctcaccgcgataaagtctgccgaatctgcgccaggctcaacagtcacggatatctcccaaccatttaatgaccactcagctacgatcccgccttcaggtaaaggatagagatagggccttggaacccccagactctccatccgctccaacagatccttcattgagtcgatggcgttcgcggatggcgctggatttgattcgctgtaccatcccgctcgcgtctgcgctatttcggccagacgaacagcagtggtggtcaggggttcaacaggaccgaacgggatctcttcatactccgtaatcttgatcaggcgatcctgtcggtcatagagtccaagccctgtaatacgggcggactgccccaccttagagaaaagagcagtccactcatatgaagtcggcacgaacaagtcgaccggcgccccatccttggaaactaggtggatcagctgctctgttcgacgccctccatcgaaggtgaaatccccctcgacgtgaccctcgtaggaattccccgcttgtagaacgatctttttcctagtctccccgttgtaacgaacaggcgcacgcccgccttcggagagctccagaaattcgttgtatctaaaatttctgccaaatttattgaactttgaagccaacgcgactggaaaagcatcgggaagcgcgaggccactattggtccttgatatgacatcaaaaatcatgtctctcgcggcagaaaacgccccaatttctggaaatggcagagtagcctgatcctccattgggccgaggttgtcctcagaaaatctgcgacttgctagggtcacgctattgcctggcttgagagaagcgattcccaattgaaaagaatctgcgaagccccgtggaaccttctggcgctttggatttgcacgcctaaagagaacacgcgccagatcaatgatgatttctcgatacactgccagatcagagagaacatcaaatggcaccaaatgttgatcgaaccgccctccggccaatcgcatgcggatgaagtctccggcatcgcccggcgtcaccccttctgattgctctgcatgctgtgacatagatgcgtctcgctagtggcgatgaaatagagaatttgtcgaacctgcgcagcgatgcatcgggcgtctcgccacgctcaggcgctgacgactaccagggggccactgccaatttccctgccagtttcgtccaccgcccaaatactccagttgcgagcgaagaacgtccttaatccagaaaaatccttcgagctctctcccgccatggtgatgaagaagccgtccttcgcacagatcgcctgagaagtacccgaccagactagcgatcctatcaccgctccaccaggcccctcgatgatgccctccaccctgagctcaagctttaaagttgggtccagtgccacgcaacgagacgggtcgaagatgtagctgaactggcctagctgctcgccggtgaggcacagcgcaacatctgccttttcgtgcctatcatcgattttcgcccggataagccagtccgtaccctgtcggatcagggagcctggggcgacgtcaaggtcattttcgatacggaaaaagctcgccttcagtgccattatcgtctccttggctccccggccaatccagggccttcgttcatcctatcagggtcaaccacgcttctaagaccccagcacatcgggactagttgatcagatcggtcctgtgtcggtattggctatctaccatgaccatggcggtccggcctacgaaggccacgacaaggccacaggcacacgcctcgccgatctccccagggcacccgtcttcatgcaggagatagtgccagttgatcttgccgatcaggtctttcgccaggccggcgcgggtgatcaggtctacgtagtccacctccccctctgccgaaaggatctggggggcatcacaaagcaacatggaaccgctcctgttagggactccaagaactggacgtaggcctacctaggccgttccgctcgcatcgcgcgcacgcgtaaaggcgtcggaaaactccgaagacccggccggtcccgcgcgtgtgcgtactggtctcgaaactccggggtcgcggtcggcgggctcgcccgcgtagaggtgtccattaattccagcgccctcgccgatggaccgatcccgaccagataactcattgatttccaagcgctacacaaaactgtgccgcgtgaggactcctgcgtcagcacctgacttcccggagcacagcggccagctgacggagcgccttccgctccccgcccttccaagcgttcctagccgccttggcctttccttcgacgcttcgcgggccggtcgcctgctcccacggtcgccagtcctggattgcctgcgcctgccgccggcgccgctctggggtccagccattgcgcatctgagatctcctccaatagttcgttccgccgactttttgttcccgcgcgcccggtctcttccgggaccggcccgggactttccggggcaaggttgttcacctgctggtggccaccggcaatattggcctgcttcacgaatgccaccgctctcgggttcttgatctcggccagggtctctagggtcgtccggcactgggactgcgccttcagggccaaccgcatgtaggtctccatggcgcccatgtgctcccccatgttgagggccgctcgacggctcatctccaggaagaccgcattcagggcaatggcttgactggtcagcagcctatcggcttggtcggtctcgcccttggcggcacgccctacagccgcccgggtcgacttcaccagctcgttcagctcgttcccgccggccaccccggagtgctgcgcaaacagcaggctgacgaaggcgttgctggcaatgccctcagcaatcaacccggccgacttctcctccagggtctgccccttctccagcggcacatcgagcttcgccgcgcgctggctggcgtcctcggcgggttggttctctttcctcatgaggttcaattcctctatgcaggggggcgccctgctggtgctacgatttggcgactcaaggagggggctatggacaccagatgcctgcggagactcactactcccgctctgacggctgcctccctagctctgctattcgcccttacaggctgcgggcgagactcctgcaaggaatactcccgattcacctgcaagcaacttgaaaccaagcccttcaacgtctactactacgaaggcacaaagacctcttctgagccgaatgaggtcttccttggcacggctattggccttcagcagtgcaggaccgtcgcttggaatgccgcacagacaagaaggaaggacagcgcagaggattggtcttatgtctgctgccttcagactgaagaatcgtcatgcgcagagaagcatcgatgaaccagaaccacctacccgatggagtgacccgatgagcagtgacaaggtagacctgtccaatgttggcggacggcctaaggattggatgcagcgggagcatgagaaggaagtcgcatcaagctcaactgatgggtggaaggtattcctatcagttggagcgatcattgccttgttcgtcttcgctgcctggatgctggtctctgtcatttttggcccgttccactagggcttttgcgatctcttccagttcgggatcgttcgcggccgctgcctgtttctgcaggaggatcgcctgtggcactgccgccccccgcggcatgttggtttgtgaggcaagccacctcacggcgattgggctggtgagtgcgcgagcagtcgcatttgctccaactccacccgctgccacgcccgctgcagtcctgaaatggccactgcccaaagcattgagaaggccaacccagtaagcgatcgcggtgaccttgtccccgcttccagatgggttcgcatagacctttgcgccttctttgatgttgtgcgcaaccctggccacctggttcatcgactccctgaagttcttgccatagcgaccgaacagcaccgtcttggcctcctcgctcaggtcattccagttacgcatgaaagtggacgaactgaaaacgtcgccatctacgttctggttccccggagtggctagccccaagcgcttgatcacagctgcagatacggccttctgctcattctgcggtagcgagtacatcacggcacggagcgtggttgcaccatccctggtgcccgaagtagctgcctggtagaccttctccgggcccccatgcttgttcagaatgcgctgaaccagatcattcctttcagcgacgttccgggtgtagttgttagcacgtgctgcggcccgcactgctgccggtccactgttctgcgcagccgcaagcatgtcctccgacagggccccatagaccttctggagctcctgcagatcagtgctagggttcaggggcgacgagcgcccgatctgctcgccaatgtcggtccggatgcgcttgagcgcctcatacgtcaggtttccgccattcgcctggagatccgcttcgaggttgttccgaagcctagacatgctgggctggatcaaatccccggttgttgcccgtgcgcccgggttgggagtggtgagccgctgaagaacgcgttgcgtgttgaccatgggagtcggcgcggttccagggatctgctgatcgaccgcccagtacaacgcgcgtttcaccgcgtttgtgtcgcccttaaaggcattcatgcctctctcaattgcgagaccagcgttctccgaacccggatttggcgaaaggttggaagcctttgctttaagccctgcgccgatccgatcagcctggtcctcggcaaatcggccgagtactccaccactcgtaggacccttggatagcaggccctccatcccctgaacccatcccggccctgcagcctgtccaacggaaggcgtcgcaccaagtgcctggaagtcagcaagcgtgttctgcatgccttggccggagcggccccgaaccgcaccgcgcaatgtagccgcgccgccagccgtcgcaacacctggggcgagtccacccgcaagtccggcaaggagctgattgcgttcagatgctcctgattcgcgcgctacagaggatgctccagatccggtaatggaagacacagtctgcagaccaggctgggtggtcaggaggtcggcaaggcgattcctgacgggagccacatatcccggggttcgtattgcagcgctccttccaagattggcaagtgcgttgatcccgacgccagcacccatggtgaggctagtgcccgccagtgcttcagcaacatcgcccaaaacacgatcagcgccagtctgtgccttgggtaggccgagccgatctgccagagctgcagcctcttctcggtacgggcgcgactcctgcaggcccacagcacgcgccactggattggcgacatagttgttgaacgcgtcgccgccaactgcccctagcagaccgccagcactctgcaacgccgagcgaacgccgaatgcgaagtcacgccccctgcccggcatccacccatcggcttggcgaccatctgcagtactggaaacactggaggtcacattcgagaaatcagcccgctcaggtcttccgccaacaacttcgagctccattggagcctgtccaggccaattcacagtgcgcgaggtgtcactgtcgaacgcctgacgaacctgagcatgctcagcagcaggcacatgcggagcaacaacttcgttccagtattgattacgagcttcctcctgctgctctggcgcaagggcctggtaggcaggggaagcggccacgtcaacccatttcttggccattggtcagttccagagattgctgtagttggaagaagatggcgttgatgaaggagctgcgcctccgtagtgctggccagcccctacagcgggcgctgcgctctgagcccgctcctcgtccgccaaggactgttccaccgcggacctccacttcttgtagtgtgtctttacacgctcaatgttgtctctgatctgagcctcagactgattgggatcgaggttggcaatcgttgattgcagcgcaaccagctcctgtaccgcgatggcgcccagcgcaccgcccgtgggcgacgaatcgcgcatctgctgcagcctgtcgaagccgaggttggccttgatggtttccaattctgcagccaggttgtaggaggggctcccctcaacgccacgagagcgagcgcctacgaagccagtcgaatatgggcttactagaccgagcgccttgtccagcgacgtttccacgttcccggcggcagtcagagcctgcctgtactgctggatacgcttcggacgctgtgctgcgtccttagcctgtgcttccgccgctgctgttccggctgcctgagtgatcgccccctgagtcttcacatcctgcagctgacgctcctgattgagcttgttcgggaagttggcgttctccacattcgtcgtagcctgcgcagtacgcgcagcctggtcttcgggactgcgaccaactgcaagtgcaggattaatattgttggacgcgccacgggggagctgcagatggatgtgatcgccctcatcgatggcgtgatagcccagctggcgcgcacgggagatgaatgcaggcttctggttggtcgggactgcatagtctgctgcagtgccattgagatgctggctgttggactgacccccgacctgggcattccgttcggcagagcgcacaccgctggtcatggtcacagacgggaattcagtcgccaattggctgaatgccgcgaagtgattgccgtctgccggagtagctacaggctgcggaccagtcggggcttgcggagcagtgcccatcccagtagtgccgcccagcggcacaaattccccagtggactcgtcgtacacctcacgcgatcccgtacgcgggttattccggcccatgcgcttaagaccgtccgctccttggaattcgaagaatccataaccagcgttggaggctcgtcctttcaagccaagctggatctggcgtgcctcttccttctgttccggcgacagccctgtagtcatcatttcgaaggagcgaacatcggtaggcgtttgaccgctgatgtttggggtgttgttcgctaccgagaggacctgctcaacgatgggcatcaccgtagtggcatcgaactggtcggggatctctgcgccgaagttccttttgaggtaaggaactgcgctgcgatagatacccgcctgcatctgagggctgttggcgtactgcttcagggatttcgccaaaccaatcagcttctcgtgctgacggcctccttcagtctgataggcctgcgcggtcttcggatcaagggcgaacgcccgatcggtcgcgggcaaatctcccgcgatgaccttgggtgccagctgctgcaactctgccagcatgttgcgctgcgtgactgccttttggcgctcaagaccgttctgcatgccttgagcaaaagattcatagaaggtggccattagattcgggagctccgtctgtagtcgcttggctgcgagtgggaaggggcgcctggcgcgccttcatcggcaaaaaagaaggcggcagctctcgggggctgccgcctggacccgcccttggggggacgtggggccctactagataggtcgggatctgggtgtttctgactcccgcgtccacctaggtctaatgccgtccattcacgaatgaattcgacttggtcatttggattgctcgcctcacctcgcccttgacgtcgatgtaggtaacggacgcaatattgcgtcggttgaactccctatcgcgatccagtctgtcgtaggccctcaagacaacgctgcggcgcttctgtccctcactcgcaagcgctccccatggcatcggcgactctccggctggcgcgactcagccattcaagcaggcgcctctcagccgactggacctcggtacgaaaccgttgttcttggagggcctggtctttcgccgactcccgataggaccgctgaggccgactcaccagcaatctccgcgccgcctccaacgcagcccactccggatggccgcatgcagtcatgtgcatacagaccaacggccagcgtctctcgccaccgatggcatacagcatcagccaggcagcaagtggaccgtccagttgcgcgtccgtcagtgcatgcagcaccagcctgcccggccccctgacaggcgcggccgtaagcgatccctgtgtcttccagctccgtagctggcgagtacgatcagccgcggccggcgcgcgcatcaccgccatctggtcaaaatccagcactgcttggcgatccttcgggctgaacctatccagcgcttgcttacgagccgccgcctgcgttggtaggtacttggatgccgcctgctcaatcgagtgcacccgatggataggcaggtacgcaccgtcatccgggcagcactcctcgctggagctccgtctcgtcgcatgccggattgtggggcgtgttggcgccccgaagccaaacgcgccagcgatgctcctcaccaccaaatcaactgcctcgtcctccagcagcactacctccaagtaccgctcatggtctcgagatgccatgggcggcctcccggcgcgacccgtccggcagacggactactccgcctgacgaaccggttcgcgcttctccatggaggcgtccagaaacgaccaccgtggcttgaagccctaaagccaatgccttggagcaagaagagcgcgctccgcttggtatatatctagaagggtgtacgcatagcgacctcgaaggggtgtggataaccgcctgactggcctgcattgcgacctcgtaggtctctatgcgggccaactcatagcgggattggcctgcatagcgacctagttggcctacatagcgactacccattgcgattcctccacaggttcagtggagttacggtcggtggctcaaggtgcttttcggactcatcgacggcgtaataggtcagcgcatacaggctgcacatgttcttgccacctttgcgcgtctcgatgatccagcctgcggcgaggagctcaagcttggcgccgtgcacggtcgccttgctcctccaaccacgggtcgagagcatcgaccaggggatgctcaaatcgccgtttttgccaggcctgtactgccgggccagttccagcagcagctttacggcgttaccagatagctggccgaactccggcgagtcggaaatcctgtgctcaagcatcaggaacggcgcgcccttcgaccgccctacgagcttctggcgccgcctgtcagtgttcttcttgggttgcgcctggccatagcttgcgccgccctctggagaccgctgggcgcggtcttggcttgtactgtgcatgtgcccccccaagggcaaggaacacggcctcagccgcgcttaggacgtttggctctacaggtcgtccctgcgtccacgtgacgccaagtcttcttcttgcggatgcacctgatagttgaactattcacgccgtagcggcgcgcccaaaccttggttggaacgattcccaccgtacgcaggacagcttccacctctgcaacgctgagcttgcactgggaggaggggctgccgaacttggctatgttccgttcgcgttgaagtcggcgattctccgaaccagtcaccagttgcaggttgtccagcctgttgttcgacgaatcaccgtcgaggtggtccacctccatcttcttgggtacaggaccgtggacggcctcccacacgagcctgtgggcataccaggttgtgcaggaaccacctgcccggcggtgaatgaccctgatgtacccgtcacggtatctccggcctactgtccgcccgcaggcgctccatagctccccagtactcggcgagacgaggagaccgctggcgcaatgcaatagcttgtcagtcgcgctaggaagcattgggggcctcccaaccgatctgctgagagctgcaccaagtggctgcatgctgctcaaggagaggcttgcgctcacgatatggcctgccctgcccgatccacaccgcgttctgcatcctgagctcttgctgcagcctgagctggtctgtggaaagcgagtcttcgcagacaccgccaaagaccccagtgatgcagtgattcacgagtcgatgctcggcggcgtagtcgtagcccttcgggtcccggcccagcccaaccagcgtgtcgcgcaggatccggcacatcacggtgcctgcgacgcgctttgccattgccgcatcctgcctagtgtcattcgagaggaatgccgctgcgagtacgtcagccgcctgctcttggaagaggatcacgcgcgatcgaatggcagccttcaccttgttggggtttacggtggccagccagaacgggagcctagacaacggcagggcctgcatttggcgacctttgccatcgccagcaaccatcccccttaaggtagacagttggcgggccaggacggggtgagatttcagcttctcaagctgcttggaccaatccagacccatgccttccacgatgggccgcatggccacaaaggggcatccttggtggagacggccgatgagatcggcaccgtggaactcgacatggacgattccagttgccattaggcagccctcccctcttcgcagcgggagtcgatccagcaccgcaccgcctccgagtcccaggcagacaagcgggcagccacccggatcggtcggggaaaccggccttccttcgccatcttgtagatgagagagcgggacatgccgcaagcggcgatcacctcgggcaggcgcattagggttcggccctgagcggccacgcgcccaagccggattgacctgccccctttctcagggccactagctacttagtagagtccaggttggggagcataccgctccggtgggtcaggtttcgatcagcggtcgaaccagtcaaggcaccttcgttgcgcagcgcggcggcgaactcggcaggcgtgcatttgggcagtgagctgtgcggacgcacctcgttgtagtccttgcgccagatggcgattaccgcccgtgcgtgctcgagcgagataaaccagttttcgttcaagcattcgtcccggaacttgccgttgaagctctccacataggcgttctgcgtgggtttccctggctgggtcagcacaagcgtcacgccgttggcggtcgcccactggtccagcgcccggccggtaaactcgggtccctggtcggtcctgatcgccgcggggtagccgcggaaacggcataccgcatccaggatgtcggccacgttctggccatttatcctccggccgacggcgatttccaccgcttccttggtgcaatcgtccaccaccgtcaggcacttgatcgggcgcccgttggccagggcgtcgaagacgaagtccatcgaccaggtgtggttgggccccgacggcagctgcagcggacggcgctcgacggccacgcgatcgcgcttgcggcgcttgcgcaccgccaggccagcgttgcggtacagccggtagattcgcttgtggttggcgatccagccctcccgttccagcaggatgtgcagccgtcggtagccgaaccggcgacgttcgcccgccaacgcaacgagcctggcctgcaacggcgcgttcgccatgcgcggctggtagtgcaacacgctgcgtgacaagcccagtgcccggcaggcccgccgctccgacaggcccagcttcgcccgcacgtccgcgacggcagcccgtcgcgtcggcgggctcagtattttccccgcgccacgatcctcagcgcttcgttgtccaacatcgactcggccaacagctttttgagccgcgcgttctccgcttccagtgccttcaggcgcttggcgtcgggcacatccatgccgccgaacttgcgccgccacaggtagaacgacgcgtcactgaagccgtgcttgcggcaaagctccttgaccggcgtgccggcggccgcctgcttcaggaagccgatgatctgctcttcggtgtatcgcttcttcatgtccgtcctcttgtgagacggactctactaagatcaggttggcccggaaaacggggggcaggtcaccagagcctgaattctgcctagagtctctcagtgaaacaaagaagggcgtgctggaaaactcctcaagatagtcaatggactggaatgccttcctagctgctttgaactccttcttggtttccagttcaaccgcggttctcatgccgaccaacaactcaggaccgttctcgatgtgatcaagtgttgcgcccatatgcgcgacggtccagttgctaagtgactgtacgctaccaaagttaaaggcatccttgtcgacggcatagtcctgcttcttccaatcggcccatcccatgccctcgtcctcttggaagcttatgaaggttgcctcaagctcctccagactaaccccggcgtcttcatcgtcaattcgatagaactctggagtttcatcaagcagctggcgaagtccactgactaccgtgagccatccattggcgtccaaaccagacaagcggtcgtatgcatcaagattgaaccagtcgggaattcggctggcgggtttgggacgggccatgtagttgttcctcaattcaagctgcctcttactgaggccttgcgtccagggatgacaattcgaaagcaggatggtcggacctatcagggatcagacattgcactggaaccatgcgtctaccggcgtactcctcaacggcgaccgatgccaagtcgctgagagcaccctccaattgctccatggtgtagtcagcacccctcttggattcaaggcctcgcatcagaacctccctcagcggtgatccagacccaaagaatccatcgacaatgcctcgctgagcgctgtccagactccccccgtaggcctcaactgccgagcagacaatatcggccaggtgggcacttttgctagtgcgtgggtctgctgcagcctcctggagagcctggaggaacgcgatgcaacagacccgccccacctcccggcccatcagatgcccacgggcttccggcatccgccagtagtccccaactttggcatggctctggcggtagaagggcaagcgatggatggggtttgcacgggtccgattgaatcggaccggccgcctgaacctacttgcgttactggccatggttgccctcctggctatctgtgaagcgtttcatgacggtggcaacgtccttctcccattggtgcatccatgcctttgcccttcgccgcgcggtcgaaacggaaatagggcgtccggcctgtgcagcctcctgcagcatccgtcctgagatacgcgtcaagttgtccagatcagcttggcggtctttggcagccaaggctctgtccctcgccttctgctggcgacgcaatcgactttcagccctcttagccgctgcttccgtggctagtctgtctctctccaagacggacttaggaaacgcgagtgggagcatccggtccgtatccgagatagcggtcgcgtaccaatgcacgccgtgtcggtagtgataaagcggttccttgaagaggtctggccatccgagctcaaacggttcttcatccaacggatgccaacctagctccctgccacgagtgaggagcctggctgcagagacggactcaacaatcacttcaccgcgctcgccttgatagcaaagccggaacttgtggtcgattcgagcagcaagccagtctatgctgcagagctgatgtccgatcaaagttcggatcggtacgccagcttcgaccagcgcctcaatacggacttcgagtacatccttttcttgccttgccttcgctacagtcgagctgagcatcacagcacctcctgcatcgcgtttcctgcagcagaagcccgctcgcggatcatgctgatggcagcagctatcggagccgggaaatctgcctcgaacatcgattgctcgttgaagagcagttgacagatcccctcaatgtcacccatggcaaggcttgctgagttcagtgcctggaaaagggcatcttccctgctcagggccgtggactcgcctttattacgcttggccattggtgcgcccccagagttcgagggccaacgcgacggcgaaaagtacgaggcagacgcggtaggtattgaggtcgtcgttggcgctgagccagccgtggcaagcgcggatgatcccgctgctggccagtacggccggaagtgtgggccggatttcggccgagcgcgcccgttcaggcgcaacaagtacaatgttgcaatccatgatcgactctccaatagtcggttgtggtaggccgagctaggggttcccgcccctttctcggccgctttgtttatgcggctgtgcttattttttcggccctcctcaaaggcctatctccggtggctaggcgcgcttggctttgaaggccagcacgttcggttctgtaacgcgcagctggtcgagatagtcagaccaggcctgcatcatcttccggcgttccggcaggtgggttgcccggttgtaggcccgcccaagcggatcctttacggcatgcgccagctgatgctcgatgtagtccgggcgataaccaagcacttcgtccagcacggttcttgccatcgctcggaagccatggcccaccatcgtgtctgagtcgaatccaaggtttcgcagcgccgcgttcagcgtgttctcgctcataggtttttgggcactacggacacccggaaacacgaactcgctgcgtttggtgtagggatacaggtccctcagcacttcgacggcttggctcgagagcggaacgatgtgcggagtcttggtcttgctggtgacgtagcgccactctgccgcatcaaggtcgatgtcagcccacttcgcctgcctaagctccccagggcgaacaaacaccattggggccagctttagagcggcttgcgtgaccagtgccccctggtagccccacagcgcgcgcaggaggcctcctataacggcaggatcagtcacgctggcaaagtgcttggtctgaggctgttcaagcgctcctgtgaggtcctgagcgggattgcggtctgcgcgacccgtagcgatggcgtagcgaaatactcgcccagcatgcgcccgggcacgatgtgcggtttccacgacaccgcgatgttccaacctccgcagcgccgccagcagcacgggagcggtgatgtccccaataggcagatcagccagcccagccagatccttctcgatcagccgacgctcgcgcacgaccgatccaggggaaaggccctccttcgttcgcttggcgagcaattccaagccgatggctccgaaggtgttcgcggcccgttctccttggaccgccttttcgaccctggccacttgagcgggattagccccgccgcgcaggagcgagcgcagacggtcgcgttcgacgcgggcagcctgcagcgacatcgacgggtactcatcgagcgtgacgatgctggcctttcccagatagcggtagcggtagcgccacaccttggctcccgaggggcgcacttcaatgcacaagccgttggcatcagccacacggaaggggctggccttcggcttgagcgagcgcaacttggtgtcggtcagcatgtgagtcgagcgcctgtgagtcgtccaagggcgtctagcccactgacacacagcctgactcactttttttgtggatgcaagtggatgccgctggacggccatggatgcgtcacggcgctgaaatcaagcaactcaagggcttcgtggacgtctccggacttcgctggacgtcaatgtggtgggcccaccaggattcgaacctggaaccaagggattatgagtcccctgctctaaccgttgagctataggcccggcgcagcgtcacagtgtagtggaggccgcgcccgatcggctacccggcggcggcaagcgcctccgaaatacgccccagccgcctctccgccgcttccgcgagccatacctgccgcctcaggcatgcctggaacaacgcaaccatccttctgatctgctccagtccctgttggttgtcgccgctgaagccggcaagcaatccggcctccgacagcgtcagcagcgcatacgtcgtacggcgtgcaaatcccaatcgatcctcgcactcatcccgcatcacctcatcccagtccagcagcggcgggaaatcggtttgcacgggctcgggaacatcgtgctccacatcattcatggcgtgactccagatgcatgacgaatcaatgccgcaggccgtacgagttgcacgtgacctgccgcgcgcttgcatcggcgccggtgatgactggcccgcctacgggatgtgttgagcatctgcgcgatcagcgtgcgaccgtcgcaggaaaaattcaaacggcagatgcgtcatcggcaagccccgtcgggcatgtccaggcaccccaaaaagaaaaaccccgcaccaggcggggtttctctcaacgcttcaccagccgctggaaatcaatcgatatccaggaagctgcgcagctgctccgagcggctcgggtgacgcagcttgcgcagcgccttcgcttcgatctggcggatgcgctcgcgggtcacgtcgaactgcttgccgacttcttccagcgtgtggtcggtgttcatgtcgatgccgaagcgcatgcgcagcaccttggcttccctcggggtgaggccggccagcacgtcgcgcacggtttcagacaggttgatgttggtggtgttctcgatcggggactccacgttggtgtcctcgatgaagtcgcccagatgggaatcctcgtcgtcgccgatcggggtttccatcgagatcggctccttggcgatcttcatcaccttgcggatcttgtcttccggcatgtccatttccttggccagctcctccggcgtagcctcgcggccgtactgctggagcatctggcgggaaatgcggttcaacttgttgatcgtctcgatcatgtgcaccggaatacggatggtgcgcgcctggtcggcaatcgagcgggtgatcgcctggcggatccaccaggtggcgtaggtcgagaacttgtaaccgcgacggtactcgaacttgtccacggccttcatcaggccgatgttgccttcctggatcaggtcgaggaactgcaggccacggttggtgtacttcttggcgatcgagatcaccaggcgcaggttggcctcgaccatttccttcttcgccttgcgcgccttggcttcaccgtaggccatggcacggctgatttccttcagctcttccaggtccagctgggtcagcttctcgatgtcgatcgtcgcctgctgttcggcgatgatctggtccttcacttcgcgcagggccgacgaccacttctgcttgcgcttcagtgcgtcttccacccactccaggttggtctggttgccttcccaggagcggatgaagtccttgcgcggcatgcgcgcggtgacggtggccaggttcagcacgcgtcgctcatgggccttgatcgacgccatggtgtcgcgcagctgcttggtcagcacgtcggtcagcggcagcggcagcttcagggtgacgaacaccgccgacatctcttcgcgcaggcgcggcaggttcttcttgtcgcccttggtcgccgccttcttgaaggcattgaaagcatcgctcagcgcctgcatgcgcgcagcgacttcctccggatccggaccggtcggtgcggcttcttcctcgccaccctcgacgtcatcgtcctcgtcctcgtcgccttctgcgtcggcatcgctgctgtcatcggcagcgaccgccggcggcgccggctcttcgtcggccaggtcgttgaagccgacgatcacttcggccaggcgcttcttgccttccttgtgggcctcgtagtcggtcagcagcgattcgaccgaaaccgggaactggcccagggcggcctggacctgcgaaaggccttcctcgatgcgcttggcgatggcgatttcgccttcgcgggtcagcagctcgaccgtgcccatttcgcgcatgtacatgcgcaccgggtcggtggtacggccaccttcggtgtcgagcgcgctcagcgcggcggcagcttcttcggccgcggtgtcatcgacttcgcggttaccggtgttgccgtcgttgagaagcagggtttccacatccggcgcaacttcatggacatcgatgcccatgccgttgatcatgccgatgatgtcttcgatctgttccgggtcgaccatgtcgtccggcagatggtcattgacttcggcgtaggtcaggtagccctgttccaggcccttgctgatcagttgcttgatttcggattgggcaggacgttcgttggccatgtagtgctcgcgccaccggctagggagaaatagggaacgtagcattataccagcccggggccctgcctgccgggcggtggtcccggcggcctagggcctgagaaggaaggtcacgggaccgtcgttgaccaggctgacgaccatatgggcaccaaaccggcccgtttccacccctggcgcatgattttcacggcagatgtcgacaaatcgattgaacccgcgttcagcctcgtccggcggtgcggcgctggtgaaactcggccgcatgcccgaacgggtatcggccgccagggtgaactggctgaccagcagcaggccgccaccggtgtcgcgcagcgaccggttcatcttcccggcctcgtcggcgaacacccggtaacccagcaggcgttcggccatccgccgcagctgggcctcgctatcccccggttccatgccgaccagggccagcaagccggggccgatctgccccaccacctcctcgtcgacatggacggcggcctggctgacacgctggatcaggacgagcatcgtgggcttccaatgaacggggccggccacgatagcagcgcccttggctaaactggcgccgatgaatccgcaacgcaaagcccggctggtctaccgcgccaccaccctgttcgcccgcctgccctggccgctgctgcgggggttcgcacacgccctggcgtggacgtgggttcgtgtcaatgcccgtgagagccgcgttacccggcgcaacctcgaactggcctacccggagctggacggtcctgcacgcgaccgcctgcaccgcgaactgctgcgctccactgcgctgcaggccatcgagaccctgcgtttgtggagccggcagccggccgacaacctgcggctgcacctgaagcagcgccacggcgaagccctgtacgacgcggccctggccagcggcaagggcgtgatcgtggccgcaccgcacttcggcaactgggagctgctgaaccagtggctggcctcgcgcgggcagatcgccatcgtctacaagccgccggaagacgaggccagcgacgccttcctgcagctggtgcgcggcggccagaacgtgcagcaggtacgcgccgagggcccggccgtgcgccagctgttcaaggtgctcaaggacggcggcgccaccggcatcctgcccgaccagcagcccaaggccggcgatggcgtgttcgtgccgttcttcggcgtgcaggcgctgaccatgaccctggtcaaccggctggccgagcgcaccggcgccaccgtgctgtatggctggtgcgagcgcatcgggccggacatggaattcgccctgcacatcgagccgaccgacccggccgtggccgatccggacccgcaggtggccgccaccgcgctcaatgccggcatcgagcgcatcgcccgccgcgacccgtcgcagtaccagtggacctacaagcgctatacgctgcggccaccgggcagcggcgaggaagatccgtatgcgaccgaagagcatccgcactgacggcccccacgcccaggcccatccggcccctgcgaccggcggccgcaccacgttgaatacgacgccggcgcccccatagagactgcgatgtccgcctcccccggtcccgccatgcctgctgcctcttccctgttcggcgaccccgccgcgatccgctgcgaacgcgcggtggccgaactgcgtgccggtcgcccggtactgctccacgatgggcagggccagcgcctggcggtgattgcactggacagtgccactgccagcagcttcgctgccttcgccgctgccgcacgcgagcgccattacctgttcctgaccgccacccgcgcccgcgtgctcggcgtggaggcaccggcaggcgcacgcctgccgctggcgggggttgccttcgatgccctgccctcgctgggctacctgcgcgagcccggcccgatgccggacgactggacggccggcgacgccttcgatgccggcgcggtggagctggcccgcctgggcctgctgctgccggcgatggtggcggtgcgcctggatgcagctgaccgcaccttcgagggtgctgctgaagtggcgctctgcgatctggccgaaggcgcggcccacgccgcccacgattacgaactggtcgcccgttcgccggtaccgctgcgcgacgtcggcatgaccaccttcgcggtgttccgcggcggcgtggcccagcgcgaccaggtcgcgatcatcgtcggcgaaccggacctgtcggcggtggtgccggtacgcgtgcactcctcgtgcctgaccggtgacctgttcggctcactcaagtgcgactgcggcgaccagctgcggcgcggcctgcgcaagctgaaggaactgggcggcggcgtgctgctgtacctggaccaggaaggccgcggcaccggcatcgccgccaagatgcgcgcctacggctaccagcacgacggcctggacaccatcgatgccgatgcacagctgggcttcggtgccgacgagcgccgctacggcagtgcggtggcgatgctgcatggcctgggcatttcgcgcgtggccctgctcagcaacaacccgaccaaggcacagcgtctgcgcaacgccggcatcgaggtgctggactgcattccggtcaccggcgagatcactgccgaaaacgaacactacctgcgcaccaaggccgatcgtgccggccacatgctggatgtggacgcgctgatccaggctgcccagtagcgcggtcgacctgctaccgtctgcgcggtgtggccctgccgccaccgcccgccctgccacctgacggagcctgcgtgatcgacgttcccctgacctccccgcctgccgatgcctggcagtcgctgccgcagcgcgccgcccgcttggccgcactggaaggcgccttcggcggactgttcgtgccgggcctgccgctggccgcggccgcgtggttcttcgagctgcccggcggcctgtggacggccgcccttgggctgctgatcggcatcgtcttcggcgcgtggcttggccaccggcgcttgacccgcacccgctggcggctggatacccaagggctgggcctgcgccgcgacctgatgtggcagctggaaacgcgcatccccatttcgcgcgtgcagcacctggatctgcgccgcggcccgctggaacgccgtgccggcctggccacgctgatcgtgcacaccgccgggacccgcatgagcgcagtgaccgtgagcggcctggacgaggccgacgccgagcgcctgcgtgacaccctgtcccatcagctcgaccaggacgccgacgccctgtgagcctgccgccgcccctgcccgcatcgctgcctgccggtggcgaggaccatcgcctgcacccgtggtcgtggctgttcgtgctgctgatgcagctgcgccactacttcctgccgctggtggcgctgctcgtgttcggccagcgcggtgaccgcgacccgatgtgggcgcagctgattccgctgtcggcgattgccgcgctggtgctggtctcggtgctgcagtacctcagctaccgctaccgcatcggcagcgacgcgatcaccgtgcgcagcggactgctggcgcgcaaccgccgcgagatcccgttcgcccgcatccacaacgtggaagtgcggcagaacccgctgcaccgcctgttcggcgtggccgagctgcgcctggaatcggccggtggcgtgcgtccggaagccgaaatgcgcgtgctgaagctggaccaggcgctggcgctggaacgactggtgcgccagcgtgggcaggcaccgcaggccgccgacgtcgtggccgccccctcgatcaccgacgccgacaccgaacaggtgctgctgcgcctgtcgagctgggacgtggtgcgcatgggcctgctgtccaaccgcggctgggcattggcgatcgccgccttcggcgtgctgttccagaccgtgccgcggccggtgatggacgcggccatccagcgtggcggccgggaagccttcggctacgcaagccacctgcatcccggcgtggccggcgccttcctgctgctggccgcagccttgctgctgggctggctggcgctgcgtgcgctgtcggtggtgctgaccctgctgcgctatcacggcttcaccctcagcgagcaggaccgccgcctgaccgtctcggccggcctgctcagccgcacccgcagcagtgtcgcgcgtcgccgcatccaggcctggacgctgcgcgaaaccaccctgcatcgctggttcggcctgcgccagctgcgcatcgacagcgctgccggcgggccctcgcgcgacgaggaccgcgccctgcgcgagctggcaccgctggcaccggcaatgcgctgcgagcagctggtgcagcacctgttgcctcaactgcggtggccgccagcgcaatggcagtccattccgcagcgtggctggtggcggctgtgcctgggcgcgctgctgctggtgccgttgctggcagcggccgcgtactggcgctggggatcatggggcctgatcgtgctggcctggctgccggtggcgctgctggtggcacatcggcagatggcgcgcatgggctggtatctggatgcccattacgtggccgtgcgcggcggctggtggaagcgctggtggcgctgggccgagctggacaaggtgcagggcctgcgcctgcagcgttcaccgctggacaagctgctcggcaccagcagcctgcagctggatacggccggtgcgcacggtgatgtggcgttgaccctgcgctacctgccgcaggcacaggcgcaacacgtgatggagcagctggccgcggcgctggcgcggcgcaagctgcgctggtaagcaacaccggtagtgccggccgctggccggcaaccgcagacattcccgaggttgccggccagcggccggcactaccgcgagcggggtcggcgaggcatcagcgctgcgacggcccccaatatcccaggtccttgcggatctgcaggtcgcgcacccagctgccgaagggcttgcgccgcagcacgcccatttcaccggacaggaaatcctcggtggcggcgatcacccgctcgctggacaggccatcgcggtacggatggatggcgtcggcgtagcgcacgatctccgcctgcagcgcggcgtcgggatgcagcgcgcgctgcagcatcgccggcagctgcgccgggtcgtcgaagtcgatcatgtgcggcttgggcacgcggttgcggaaggtcaccaccggcttgtgctggacgatgaactccgaaacgatcgacgaggtgtccgacaccagcacatcggcggcgcgctgcgcggccatcacctgctccggctcgatgaagcgggcatgggcaccggccagcgcgcggtagcgctcgaacagttccggtgggcacttcgggtgcagggtcagcagccagtagcgctcaccgccagcgatatcggcggcgatctgcgcatgcaggtggggcgctgcgctcaggcgctcggtgaaggtcgaaccgaacaggatcaccgggcgcccgcccgccgctgcgcgcagcgcggcgctctcgccaccgtcgtcgcggaacagcgggtcgagcttcggccagccggtctcggctacggcgaagtggccctgcagggcggcgatctcacggaacggcgcggtggtggccggcccctgcgtgcagtacaggtcgaacatgccgcgcacccggaagtggccgcgcgcactgtcgcgcttctccacgttgaagccatggaacagctgtaccttggcgccggacaggaaggtcggcacccagttggcggcgctgaacacggcacgcggccgcatcgccagggcctgtttcagtccgatgttgggcacgcccggcaggctgctggcggccgcgccgtcctcgaaccaggccgccacctcctgcccggaggcgtgcaaggcctgcgccaacggggcgagaataggcagcgcatagcgctccgtcgcaaacaacaggtacccggccatcatgtcctccacgaccgctcccatcgaacggcctcgcatctcggcctgcattatcgcgttcaacgaggccggccgcatcggcgactgcctggcctcgctggccttctgcgacgaaatcatcgtcgtggactcgtactccaccgatgccaccctggccatcgccgaggccgcaggcgcccgcgtgctgcagcgcgcgttcgatggcttccgtagccagaaggcctactgcgtcgagcaggcaagccacgactgggtgctgtgcctggacgccgatgagcggatcagcccggaactgcgcgcagccatcgaacgggcccgcgacggtggcttcgccggccatgccggctatcgcttcgcgcgcctgtcggagtacttcggcaggttcctgcgccatggcaacgcctacccggaccgggtgatgcgcctgttcgaccgccgccgcggcggctggcgcggcaagcgcgagatccacgaggcggccagcgtcgacggcagcgtcggcaccttgcgcggcgacctggtccattacccgtaccgctccctgcagcagcagctggccaagaccgagaagtacgcgcggatgatggccgagcacgagttcgcacgcggcaagcgggccacgctgggcaagctggtactggcgccggcctggcggttctggcgcggcttcgtgttccgtggcggcttccgcgacggctggcacggcctggtctacgcctacgtgcgcgccaactacgtgcgacagaagaccatcatgctgtggatgctgggcaacggccagcccgtggccgacccgccgaacccctgatcgccggggcccgcccggcgcgccgacgcatcacgagccggtgatcgcccggtggcgcgcgccttcgacgatcgacaggccggtcagcaggccgaccagggtcacgtagaaactggccgtcatctggtgcgcgaacatcgactgggtcagcccgcacaacgcgtaggtgatcaccagcatgacgccggcagcggccggcccgcggaaggtcgcccgtccgctgcggcgatgcaggcgcacgaacaaccacagcgggatgccatacaccgccagcaacagcagcaggcccggtacaccctgggtcgccgcccattcggccacgtcgttgtgggcatgccccaggtggcagcgcaactcttccgggttctcccggcagaccggcacgcgctgcatcgcgctgtcgaaatgaccgatgccaacacccaccagcggatgatcgaggaaggtctgccaggctacctgcaggcgctcgacgcgggcaccggcggaagaatcactgtcgcccagctccatccgctgcacgtcgctgtgcagctcgctcaggcggacctggtggcgcagctccggtaccgacagcagcagcgtcgcaccgatcgccagcatcccggccagcaccgacaggcgcgccgcaccggtacgccagcgcaggctcagcgccagcaccaccagcagcgccagcaaggcggcgaacacaccgcggctgccggtcagcacgatggtgccgcagccggcggccatgccgaggatcaccagcgaccagcgccgcgacgggcggcagaacaccagcagcaccatcaacaccatcacgatgtcggccagcacgatggcgttggtgaacagctccgcgcgcggggcgccgcccagcacctgccacagcgacatcacgaaggtggcgagcaggccggtcaacgagccgtaccagagccaccgcaggctgggacgcagcgcgcagatccacagcgcgatccatgggatcaccacgaaccgcgaacggttgtcgacgtcacgcaggccctgttcgaacagcaccaccgacagtacgccgagcgccagcaccgccagcatcagccagaccagcactttcaccggctggccggccatgccccgcgcgcgccacagcagctccggcgccagcagggtgctgagcagcagcagaagaccatacggcaacaggttgatcggcacggtcagcaccagtgccggcaggcagaacagccccagctgggccagcccgtgtgcaaccccgtgacgcccaccgacgggaacgcccagcgggtcgccggccatgaggttcaggttgtccggtgaagctggcacgtcgggaagtatcgctgcaatctgctggaagaatgggacgggccaacgcggcccgtcccagcctgctgttttactgcctttggacccgcttgggcagactggacaagcggaaatcgtgctggctagtcatgttcctgcaaacgccgttcacgttcccgctcctcggcagtgaccacgcacggcaccgtcaccgccgccgccggcaccagccaccagcgccgccggttggccacgccggccagttcggagcggttgcggtcgacgcacgacagcatcgcgtactcgtggaccagcagccaacggcgtccgggcgccagccgctgccagcgcgtggccgccaccagctgctcgtcccagtcagtctcgaaaccgaaggtcgctgcgggacggtcggccagcagcaggtgctgttccttccaggccaccagccccagctcggcatcggggcccaggcgggtaccgaccgtgcgcatcaggccacgggccgaactggaatcgttcagcagcgggtagccgaccaggctgtacagcacccagaccaccgccagggtcgacaccagcgcaagctgccggcgacggccacacgccagcaggctcaatccgccccacaggcccatcgccaggatcgtccacgccagcgcgtcgacggccccgggggcgagcccgcggctatgggtcaggcgcagctcgaaggccgggtcacccagcaccgccatcgcgccagccacggccaggcccaatgacagcaggccggtgaacagccccaccacggcctgcacatcgcgtcgcttcagcaaccccggcaacagcggtgccagcaccaggcagaacatcggcagcgccggcaggatgtagacgtcgcgcttgccggcgggaatcgagaagaacagcaccaccatcagccaccaggccagcggcagcagatagcgcgcgtcgcggcgttgcagccggcggcgccaggccggaatcgcccagggcagggccaggaatgccgggatccacatcagcggcatcgtcgccaggaagtaccaggcgggctggtggtgatcccaggaatgggtgtagcgccgcgccgtctgctggaacaggatatcgtccatgtaggcgcgatattcgtccgagccggtggcaaagccggccagcagcatcggcgccagccacaacgacaccgccagcaggaaggccagcggcgccagccagaagcgcgcctcgcgcgcgtgcaggcccacccgtggccaccgcagcgccgtggcgattgccgcgggcacgatcatcagcagcgccagcatgcccacgcccttggtgatcacgccgatgccggcgaagaaccagcccagccaccaccagcgccaggcaggccccagcagcaggtggcgcagcaggccgtagttggccagggtgatgaacagcagcagcaggggatcgatctgcgccttcttcgcctggaaggtgaactgcagcgcgaacagcagcgcccagccggcatacagccccacccgccgcgtccacagccgccggcccaggtcgaccacgcaccacagcgtgcccagtgccgccagcagcgacggcagcaggaaggccacgcgccactgcccgaccaggctgtacagcgtggcctgccaccacatcagcatcggcggcttgtccgagtacagctcggtcccgcggtgcgggaacagccagtggccgctgtcgaacatctgcttggccaccagcgcgaagcgcggctcgtccgacggccacggatcacgaaggcccagcccggcccccagcaccagcagggccatcaccacgaacaaccacgtctcgcgcgacgcgcgggatttcagcatgggactcgcaacgtcagcggggggtcaggccgtttttagcagacgcgcgtaaaagaaaccgtcagcatcgctgtcacccggcagtcgctggcgcgcgatcccctcgcagtccaggccgaatctgtcatccagcggctgtgccaccgcgtccggatgccacttcaggaaggcccgcacctgatcgatgttctcggcgcgcaggatcgaacaggtggcgtacagcagcacgccgcccgggcgcagcatcgaccagcaggcctccagcaggcgggcctgcacgccgaccagcgcatcgatatcctcggcgcggcggtggaacatcacgtccggctggcggcggatcacgccggtggccgaacacggcgcatccagcaggatggcgtcgaacggtgtgccattccaccacgcaccggggtcgctggcatcggccacccgggtctgcgcgccctcacctacaccggtgcgggtgtaggtatcgcgggcacgcgccaggcgacgcgcatcgatatccagcgccagcaggcgcaggctcgggtcacgctccagcaggtgcgccgacttgccacccggtgccgcgcaggcgtccagaacgctggcgccggacgccggtgccagcgcgtccgccgcacattgcgccgacaggtcctgcaccgacagcgcaccgtcggcgaaccccggcaactggttcaccgcgatgggcgccaccaggcgcagcgcgtcggcgctgagcgggctggcttcggcagcaatgcgggcctcggccagcgtggccagcgccttgtcacgccccccctgctggcggttggcacgcagccacagcggcgccggctgcaggctggcagcaaagatcgcctgggcctgggacggccagtcgcgctcgacggcatcggccagccacgccggaaaggcgtcacgcgcaggctgctccggcaacccctcgcgctgcgcgcggcgcaggatcgcgttgaccagcccggcctggcgctcacggcccagcgcgcgggcggcgtcgaccgtggccgacagggccgcatgcgccggcagttccagcacgtccagctgcgcgaagcccaccatcagcaacgtgcgcaggtcggcatcacgcgccgacagcggcttctgcatccacgactgcaaggcagcgtcgtaggtactgcggcggcgcaggactgcaaagcacagcgcttccagcaaggcccgatcacgactgtcggccagcttgggcagtgcccaggccagttccgccttcagcgagcggccacgggtgaacacctgcgccagtacgcgtgcggccagcatgcgggtggccgcgccgggcgccgccttggcgacggagaaatcattctgcttcgacaccgcttatgcccccacgtgcaggtcgcggcgggcattgaggtagtcggcggcggtgatcgccttgccgccttcgcgctgcagcgtgcgcaggcgcagcgcgccctggccgcaggcgatgtcgataccatcgcggctggccgccagcaccgcccccggcgcctggccgtgggccaggtcaagagcgaccgcgccgtggatgcgcacgcgctcgccggccagcgtggcctcggcgatcggccacggattgaaggcgcgcacggtgcgcgccagtgcatcggcgtcctgcgcccagtccaggcgggcttcggccttgtccagcttgtgcgcgtaggtcacgccctgttcgggctgcggccgcgcgatcggcttgatgccggcacgcagcaggcccaggccgtcggacagcacctgtgcgcccagttcggccagcttgtcatgcagctggccgccggtatcggtggccgcgatcggcagctcctggtgcagcagcaccgggccggtatccaggccggcttccatctgcatcaggcacacgccggtctttgcgtcaccggcctggatcgcgcgctggatcggcgcggcaccgcgccagcgtggcagcagcgaggcatgcacgttccagcagccgtgggtcgggatcgccagtaccgccctgggcaggatcaggccgtaggcgaccaccaccatcaggtccggctgcaggtcgcgcagctgccgctgggcagcttcatccttcagcgattcgggctggtagaccggaatgccacgggccacggcttcgagcttgaccggcgacggtgccaagccacggccgcgcccggccgggcgatcaggctgggtatagacggccacgacctcgtggtggcgcgccgcggcgcgcagcgacgacaccgcgaattccggcgtaccggcaaagacaatcctcatggctaccccacttgcaggatggattcgtgcaggaaagaaaacggcgccgtcggccggcgccgtacagcccgcgcgcgtcgcgcaggcacgggccacccggagggcggcccggattggcgatcacgccacgtgcttgcgctgcttggccagcttcttgcggaccatctcgcgcttgagcggcgacagatagtcgatgaacagcttgccgtccaggtggtccatctcgtgctggatgcaggtggccagcacttcaccggcctccaactgctgctcctggccgttgcggtccaggtacttcacggtgatggtgtcagcgcgggtcacgtcggcgaagatgcccgggaccgacaggcagccctcctggtacacccggcccccgtccttggcgacgatttccgggttgatgaacacatgcggttcattcttctcttcgctgacatcgatgaccatgaagcgcttgtgcacgtccacctgggtggcggccaggccgatgcccggggcgtcgtacatggtcaggaacatgttgtcgatcagttcctggaaggccggcgtggtgacttcggcggcgtcgatcaacgcagccttggtacgcaggcgcggatcggggaactcgagaatggggagaagggccatggctgtttccggatagggggccggcacgccggcatacgtcgcagattctagctccaacgcttgccttgcgccccggtttctggactatagtgcgtggacctgttggggaatcagggcttcacacctatgttgcttcgttttcgtacggtcgtcgccgcggcgatgctgaccgtggctgcctatgctaccgccgtggaagtgaatggcgggcacccggacacctatgtggtccgaaaaggggatacgttgtgggatatcgccgcacgtttcctgcagaagccttggctgtggccggagatctggcaagccaatccgcagatcgccaacccgcacctgatctatccaggtgacgtgctgagcctggcctacctggaccgggtgaccgtgtcccaggccggtccgcgccaggaggccccgatcgacgccattccgctggcccaggtcgagccgttcctgaagcagctgagcgttgtcgccagcgtcaagcagctgccctacgtcgtcggcctggaggacagccgcctgcgcgtgtccggtggcgacaccgtctacgtgcgcctggcggatgcccaggtgggccagcgctgggccgtggtacgcccgaccgtgcgttacgcccagcccaagccgaccgaggacctgaccgccaatggcgacgtcaccccgggcagcggcaacctgtggaaggcctacaacgcacccaacgcacgtcgtggcgtgctcggctacgaactggcccaggtcgccaccggcaccatcacccagatcgccggcggcaaggtcgaggcctccacgctggtgctggacaagaacgtcggcggccgcgaagtgcgcgccggcgaccgcctggtgccggtcgaagcccggccgtacgacctgcagttcgtgccccacgtacccgctgcgggtgtcgagggcgtggacgtgcgcgtgctggcggtcaccgacatgttcaccgccggtggcccacgcgacgtgatcgcgatttcggccggccgtgcccagggcgtggacaacggcaccgtgttctcgctgtggcgcccgggccgccatgtagcgcaccgcatgaagtacccgacctcctcgcgcatggacgactcgctcagcaccggcgcaggccgggtctcgctgccggatgaatatgccgcgcatgcgatggtgttccgcaccttcgacaacgtcagctacgcgctggtgatgcagggcgtgaagccggtgcaggtgggttacaacgcgctgcacccggacgcgaagtaacggttgccggactgccccggccaccactggagtgccggcctcgggccggcaggcacctccggcaaaacctgacagccacatgcgaaggcgccctagggcgcctttgttgtgtgcggccgatagtgggggatgaccacacatgcatacgaggcgctgctgcgcctgttgatggcgggaggcgcactggcgtcccgacgggccctgctgcaggccgcgggcgatgcggaaaccgccattgcgcaaggcactgcgacctggcgtgcgcacggttgcacgccggagcagtgcgccgccctggaacgccccgatacccgggcctggacatccgcccggcgctggctggaacaggacaaccatcacctgctgccgtgtaccgatccggcctttccgccatcactgctggaggtacccaacccgccgctggcgctattcgtggccggtgatccctgcctggcctggcgcccttcggtggcgctggtcggcagccgctcgcccaccccgggcgggcgtgcactggccgcgcgttttgccggctgcttcgtcgaggccggcctggcggtgaccagcggcctggccgcaggcatcgatgcggccgcgcaccaggctgcgctggaggccggcggctgcaccatggcagtgatcggcaccggccccgaccgggcctatccggacagccacgcgcggctgcaggcgcggatcgccgccgaaggcgtggtgctcagcgagtacctgccgggcacggctgcccgtcccagccacttccctgcgcgcaaccggctggtggccggactggcgctggccaccgtggtggtcgaggccgcgcagcgctcgggcgcgctgatcaccgcgcgcctggccgccgaggcaggccgcgaggtctgtgccctgcccgggtcggtgctcaacccgcgcgcgaccggctgccatcgcctgatccgcgagggcgcggcgctggtcgagcgccccgaggaggtcctggaactgctcgcccccgcccttcgccagcagctgccgggcttgcaatcgcggttggccacccccactgaacaggcaccgccggcgctcctgccggcgcgctgggccgacgaccctgactaccagtgcttgtggcgggcgctggaccacaacccaagcggtatggattcactgatcacgcgttgtggattgacggcgtcacaggtgtcctccatgctgctggccatggaactggcgggaatcgtggtgtgcgtacacggccgctactgtcgaactccctagtttcttcacctccacagcgtcgcgcgacgcaggccgaggggcaatgaaagagagcatcctggatgtactgctgtacctgtttgaacactatttcagcgaagatgcggacctgatccgtgaccgcgattcgctccagaacggcctgatccaggccggtttcagccccaccgagatcaacaaggcgttcgactggctcgatgccctggccgcgcagcggccgagcgtggcccaggcgcgggtcgatggccccgtgcgcatctaccacggccccgagctggacaagctggacgtggaatgccgcggcttcctgctgtacctggaacagcacggcatcctcgacgccgaccagcgcgagctggtgctggaccgggcgatggccctggaccaggacgaactggacctggacgacctgaagtgggtcgtgctgatggtgctgttcaaccagcccggctccgaagcggcctacgcctggatggagacgcagatgttcatggacgagccagaacccctgcactgaccgtacacttgggggcatagcgcattcaggagcgtccccgtgagcgagtggttccacgcagaaggcaaccggcagcaaggcccgctgccggcggaacagttggtcgagttgttccgcaacaaccagatctccctggacaccctggtctggcgcgacggcctgccgcaatggcagccgttgcgcagcgtggtcgatgagctgggcctgatcgtgccggcgctggacgtcgccgcgccggccgtggaacccgagccggagcccgaaccggaaccggttgcgccgccgccgccgcaaccaccggtgctgccaccgtccacgccctatgccacgcagaccccggccggggtgctgccgccgccgaaaaagaagctctccggctgcgccctgaccgcgatcatcggcggcggcctgctgctggtgctggtgccggtcatggccatcctcgcggcgatcgccctgcctgcctacaacgactacaccgtgcgtgccaaggttgccaccgcggtcaatgccctgcagccgctgaaacagcaggtgcagcacttcgccgacgacgaaggccgctgccccggtgccaacgatgccggtttcccggcgccgggtgatttcacccaggccggcctgtcggcggtgaacatcggccgcttcaacaacggccactgcggcatcgaagcaacgctggccgtgcccggcaagagcctcgatggcgacctgctgtggctggaatatgatcgcgacagcggccgctgggaatgcagcggtgaaagcgacgacaagtacctgccgccgtcgtgccgcggctgagccacgtgcacggcagcacctccaaggacgatccaacagggaacatgcaatgaccgagtggtactacgccgaaggacagcaacgccagggcccgctgccggtccaggaaatccgccagcgcttccagcggggcgaactgaacctggacaccctggtctggcgcgaaggcatggcccagtgggctgcactgcgccaggtggtcgatgagctcggcctgcagacactggccgatgccagcacggccaccgccagcggcggcttcgacctgcgcggcgactacgccgccatcgacaacggcactgcaccgctgcctggcacgggcgcgctcagcagctcgccctacagcgccccggccgcttccggtgccggtggcccgcagccggtgatcggcggcgaggtggtctacgcaggcttctggaagcgcgtagcggcgtacatgatcgactacttcgtgctggccattccgggcggcatcatcggcgccatcatcggcgtggtgcttggcgccagcatgggcgcggtgggcagcggcgagacctccatcgaaatcgtcgcgcaggtggccagcgcgctgatcaacatggccatcggcgttgcctactacacctggttccattcctcgcagggtggcgccacgctgggcaagatggcggtcggcatcaaggtcgtgcgcagcaacggcgatcgcctgaccaaaggccgcgccttcggccgctactgggccatgctgctgagcagcttcaccctcggcatcggcttcctgatggccgccttcaccgagcgcaagcagggcctgcacgacatgatctgcgacaccctggtggtcgaccgctgggcctacaccgaccagccgcacctgcagcgccatgagctgggcacggtcaccatcgtgatcctggtgctcaccggcctgctggtgctggcgggcctggtgctgctggtggccgcggtcggcttcatcgccaagatggcctcatgaacggccatcctcacgtctggctgcttgacaggggctggccgggcgtgattcctctaataaggtgaaacctgaacgcccggcacactaccgggcgttcagcgtattgatttgtccgtggccgcttcactaatgcggccgtttgctccaccctagcggcccctcccctgcggctcgccccacagacactgctgccatgcccaagcacctgctcatcgtcgaatcgccggccaaggccaagacgatcaacaaatacctcggcaaggactacaccgtcctggcctcgtatgggcatgtgcgtgacctgattccgaaggaaggcgcggtcgacccggacaacgggttcgccatgcactacgacgtgatcgacaagaacgaaaaacatgtcgacgcgatcgccaaggccgccaagggcgccgacgacatcctgctggcgaccgacccggatcgcgaaggtgaagcgatcagctggcatatcgccgagatcctgaaggaacgcgggctggtcaaggacaagccgatgcagcgcgtggtgttcaccgagatcaccccgcgcgccatcaaggaagcgatcagccagccacgcgcgatcgccagcgacctggtcgatgcccagcaggcgcgccgcgcgctggactacctggtcggcttcaacctgtcgccggtgctgtggcgcaaggtccagcgcggcctgtccgccggccgcgtgcagagcccggcgctgcgcatgatcgtcgagcgcgaggaagagatcgaagccttcatcgcccgcgagtactggtcgatcgccgccgagtgcgcacacccgtcgcagcacttcaacgccaagctggtcaagctggacgggcagaaattcgagcagttcaccatcaccgacggcgacaccgccgaagccgcccgcctgcgcatccagcaggccgcgcagggctcgctgcatgtcaccgacgtggccagcaaggagcgcaagcgccgcccggcgccgccgttcaccacctccaccctgcagcaggaagcctcgcgcaagctcggtttcaccacccgcaagaccatgcaggtggcgcagaagctgtatgaaggcgtggcgatcggtgacgaaggcaccgtcggcctcatctcgtacatgcgtaccgactcggtgaacctgtcgcaggacgcgctggccgaaatccgcgacgtgattgcccgtgattacggcatcgcctcgctgcccgaccagccgaacacctaccagaccaagtccaagaacgcccaggaagcgcacgaggcggtgcgcccgacctcggccctgcgcactccgtcgcaggtcgcccgcttcctgaccgacgacgagcgccgcctgtacgaactgatctggaagcgcgccgtcgcctgccagatgattccggccacgctcaacacggtcagcgtcgacctgtcggctggcagcgagcacgtgttccgtgccagcggtaccaccgtggtggtgcccggcttcctggccgtgtacgaggaaggcaaggacaacaagagcgccgaagacgaggacgaaggccgcaagctgccggcgatgaaaccgggcgaccgcgtgccgctggaacgcatccaggccgagcagcatttcacccagccaccgccgcgctacaccgaagcggcgctggtgaaggcgctggaagagtacggcatcggccgtccgtcgacctacgcctcgatcatccagaccctgctgttccgcaagtacgtggaaatggaaggccgcagcttccgcccgtccgacgtcggccgcgcggtgtccaagttcctgtccagccacttcacccagtacgtggactacgacttcaccgccaagctcgaagacgagctcgacgccgtctcgcgtggcgaagaagagtggatcccgctgatggcccgcttctgggagccgttcaaggagctggtggaagacaagaaggaatcggtggaccgcgccgaggccagtggcgcgcgcgagctcggcaccgacccgaagaccggcaagccggtcagcgtgcgcctcggccgcttcgggccttacgccgccatcggcagcaccgccgaggacgccgaggagaagccgaaattcgcctcgctgcgccccggccagtcgatgcacaccatatccttggaagacgcgctggaactgttcctgatgccacgcgcgctgggcgaggacaacggcgagccggtcagcgtcggcatcggccgcttcggcccgttcgccaagcgcggcagcacctatgcctcgctgaagaaggaagacgacccgtacaccatcgacctggcccgcgccgtgttcctgatcgaagagaaggaagagatcgcgcgcaaccggatcatcaaggagttcgagggcagcgacatccaggtgctgaacggccgcttcggcccgtacatcagcgacggcaggatgaacggcaagatccccaaggatcgcgagccggcatcgctgaccctggccgaagtgcagcagctgatggaagaaaccggcaagcccgtgcgcaagggcttcggcgccaagaaggctgccgcgaagaaggcaccggccaagaaggcggcggtgaagaaggaagcggcgccgaagaaggccgcagccaagaaagcgcctgccaagaaggcggcgaagaaggccgtggtaaagaaggccgctgcaaagaaggcaccggcgaagaaggccgtcaagaaagccgcgaagtagattcacgccatgcgtggataaggggtagtgccggccgctggccggcaacatccagaagcacccgatgccggccagcggccggcactaccgggccagggtccaccccttctgcacgccgcagggggataatgggggcccacgtcgggccggtcgccgccatgaaagaactcaccctggactctgctgtcgccacgctccgcgccggcggcgtgatcgcctatccgaccgaagcggtctggggcctgggctgtgatccctcgcatgaggcggcggtgcacatggtgctgcggctgaagcagcgcccgatcgagaagggcatgatcctggtcgccgccgaattgtcgcagctggagggctgggtgcgcctgcaggcgttgcccgatgcccgccagcgcgcggtgctggccagctggccgggtgccaacacctggatcctgccggccggtccgcgcgcccagccctggattaccggcgagcacagcggcatcgccgtgcgcatcagcgcgcacccgctggtcgccgccctgtgccgcgcctggggggggcccctcgtctccaccagcgccaacctggccggtgaaccaccggcacgcagccgtgccgagctggatccacgcctgctgcgcctgctcgatggcatcctcgatggcgaaaccggcggcctggcccagcccaccccgatccgcgacgcgctcagcggcaacgtgctgcgctcctgagcggacgattgcactgccacgcacaatcacgcaccctgccgccatgaacctgctgcgcaccgccctgggcctgtgcctgctgctgccatggaccgcaccggccgccgaggacgtgcgcgtctaccgctgcgtcgccagcaatggcgccgtggccctgcaggacaggccctgcagcagcggccggcaggaggtgcgtgacctgcagcgcccgcgcgatccggcaccccgggtggtgcgcagtgacgcccctcccgcggcgcccagcgaggttccggtgatgcgcgatcgcgaagtccgccacgtctacatccagccgccacaaccgttgtacgagtgcgtgagcgacgacggtcgccgctacaccagcgacagcaacgagggcaatccgcgctgggtcccgttgtggaccagcgtgtggctcccgcacgggcaccacggcgcggtccatcccggtccacgcccgggcttcggcacgccggtcggtgcgccgatcggtgaaggcacaggctaccggccgcctgcggtgggcgtcggcgtgcaggtgccggccggcagcgtgctggtccgtgacagctgccatgcgctgccgccgcaggacgtctgtgcgcgcctgcgtgaccgccgctgggaactggaccgccgttacaacagcgcgctgcagagtgagcgcaccgccatcagcaatgaacagcgtggcatcgacgcgcgcctgtcgcgggactgcgaacgctgagcgcgatgcctgccggggcatgtacgctgtgcgcatgaagaacctgatctggctggccctgggcctgttcgccggcaacgcgttggccgacgacggggtgatctaccgttgtacctccagcagcagcgatgtgcccaccctgcaacgcacgccctgccctgccggcagcaagcagcaggtggtgagggtgccggccagtgctccgccggcgccggcgtcagcggcacccgtgccggccgcgcccggaccggccgcggccactgcgccgtccgttcccgcacccgcgcctcgtcgccccggcgaaggacgcacgatcatggaagctggcatggtcgaacgcgaaggcggcgatctgatactcgacagtgcatcgctgccacgccaggccgatgccgcgccggacagcaatgcgccgccgaagccgccgctgccaccgatcttccagtgcaccgacagccagggcggtggctacctgcacgaatacgaagccgcccccgggcgctgcgaactgatgaccgtgcagggactgggcggcgccacgccggtcaatgccgccggctgcgaagtggtgcgcgaccgctgcgaggaactgccggacgcgcagcgctgcagcagctggcagcaacgcttccgcgacgcacgtggccgtgagcggttcgcctcgccggaaaaccgcgacaacgcccgtggggaacgcgaacggctgcagggcgtgctggaggccagcaactgcccggtaccggggtgacagccacccggtagtgccggccgctggccggcaatcgcaggatcttcaaatgattccagttgccggccagcggccggcactaccctttggaagatcagaacccgtagcgcaggaagccgccatccaccgcgatgcattcgccggtgacatagctggccgccggcaggcacaggaagccaacggctgcggccacttcctccggctcgccgatgcggcgcatcggcgtgcggttgatcacttcctcgtagtagtccgggtccgacaacggaccggacgtgcgccgcgtgcggatgtaccagggcgccaccgcgttgacccggatgccatcctccgcccactcgacggccaggttgcgggtcatctggtgcatcgccgccttggtcatgccatagaccacgccactgcgcacatgggtcagcccggacacgctgccgacattgacgatcgacgacgacgcgtgccgggccagcagcggatgcgcgtagcgcgacagctcgaaggccgagaacaggttggtctcgaagatcttgcgccattcgtcctcggaatattccgtggccgccttggtgacgttgccaccggcattgttgaccaggatgtgcaggccatcgctgtgatcttccacccagtccaggatctgccgacggtcctcgtcatcggagacatcggccgccagcgcgtgcacctggtgctgcggatagacatccagcagttcgtcgcgcgccgtttccagcatgtcgatgtcgcggccgacgatcatcaggtcggcgccgaggccagccagttcgtgcgcaatggccaggccaataccggcgctggcacccgtgatcagggccgtctggccgtccaggcgccaccgttgctgggtcatgagtcctccggggccgcgcccgctgtgtttcgatgcggcaaggatacgcgctcacggcggccctctgccgaggatgcgacactgcacgtacgcccagtgcggagagccgccatgcgcatcctgaccctgttctcgtccctgctggccggcgtgctgctgatggcctgccagcggccgccgacgccgaacccggagaagccaccggtgcccaaagcgatgtcgcgtgcgatgcaggaaccgctggaccgcgccaagggcgcgcagaaagcggtggaagaggccgccgcacgcgaacgcaaggccgaggccgacgcgacgcagtgacctgtggggtcagagccctttgcggggcaaagggatccgaccccaccaacgaaaacgcccggccaaggccgggcgttttcattcggtaccgttgccgatcagaatccgcagaagcagtacgccagcgccttcaccggagcgccattgcccttctcgcgggccgcgttctcgacgaagcgcaactgagtgtccacttccggcatcgtgcgtgccagcatcatccgcgccatccccgaatcggacagcatccaggcaccggcgcggctgccggcgaaaccgctgacgaactgtgcgaacggcgtggctgccttctcgatgtagcgcacgcgataggcatcggccttgcccagcttggcgcggctggccgcatcggccaccgcgtccttcaggccaccgaaggcgtcgaccaggccgcgttccttggcctgtgcaccgctccacacgcggccacgggcgacctcgtccacggcctcgaccggcttcttgcgggcgtcggcgacacggccggtgaagtccgcgtagcccttgttgatcaccgtctggatgacctggccgacggccgggtccatcgggcgggtgacatcgaaggcgccggcgaagcgggtggtgccgacaccgtcggtgtgcacgccgatcttgtccagcgcgcggctgaagttcggcaccatgccgaagatgccgatcgaaccggtgatggtcgacggatcggcatagatgcgatcggcgttcatgctgatccagtagccaccggaagcggccagatcccccatcgacaccacgaccggcttgccagcggcctgcagggctaccacttcacgacggatctgctcggaggcgaacacttccccgcccggcgaatccacccgcagcaccaccgacttcacgttgtcgtcgtcgcgcgcggcacgcagcagcgccgaggtcgactcgccaccgatgcggccggccggcaggtcaccgccactgatttcgccggcggccaccaccacggccacctgcggacgcgagtccaccgggttgcggcgcgcgtcgagcagggccaggtagcggccgaagtcaacgttgcggaaaccatcgtcggcatcctcgtcggccacgccgcgctcgatcatcagatcctcgaattcctcgcgggtcttcagcgcggtcaccagcttctgctgcagggcgaacttggccaggtcaccaccggcggcagcgatgccttccggcagggtgtcgatgccggcggccagctgtgccggatccaggcggcgggccttggcgatgtcgcccaggtagcgctgccacacgtcgttcatccagaacaggtcggcttccttggaggccggcgacgccgcgtcgagcacgtacggctcggccgcggacttgtactcgcccaccttgaacaggtgcacgtccacgcccagcttgtcctgcaggccggtgcggaagtactggcggtagcggccgaggccttcgagcacgaccgaacccatcgggtccaggtagacctcgtcggcctgcgcggccagcaggtactgcgactggcccatgctctcgctgtaggccaccagctgcttgccggaggcgcgcaggtcctgcagcgcggcggccacctcacgcagcgaggcgaaaccggacggctgcagcttgtccagctccagcaccacgcgttcgatcttcttgtcttccttggccgactcgatcacccgcagcagatcgcgcagctggatctcctcggcgccgttgtcacccaccgccttggccagcgcgcggctgaccgggtcggcgctgaactgctcgaccaggcggccttccggcgcgatcaccagcgtcgtgcggtcctgcagcgacttgctggcaccggcgcccatgccggcggcgatgacgaacatcaccagcagcaggaacagcaggccgaagaacaccaggttgaggatcaaccggcgggtgaagttcatgacgtcccacagcccgatgaagaaactggcgacggggttgcgacgcgccgggggcagcgggggcacgggttgattcatggaacgctccggatggcttcttgccgtggtaccagcatagccggtgccgcgtgatgcagcatcggacacaagtcaggggatcgcccgtcacgggtgaacgtggcgggcgggaagatcaggacagcgcggattgcccgatgcgctggctgctgcggcgcaggcgccagcccatcaggatggcagcggcggtcaagccgacgatcaggccgatccacatgccctgcgggcccatgcccagccccaggccgagcccggcgccgagcggcatgcccaggccccagtacgcgaacatggcgatgaacatcggcacgcgggtgtccttcaggccgcgcagcgcgccggccgacagcacctggatgccgtccgggaactggaaggtggccgcgtacagcagcagggtcgaggccaggccggccactgccaggtcgttggtgtacacaccgacgatggcatcgtggccgaacagcagcaccgccgccgacaacgtctgcgtgcccatgatgatcgcgtaaccggcccaggccgcacgccgcacgccgaagccgtcaccacggccgaccgcatggccgacgcgcacggtggtggcctcggccacgcccatcgggatcatgaagcacagctgcgcgacattgatcgcgatctggtgcgcagcggcttcgttggcaccaaggcggccgatcagcaacgcggtgacgatgaacaggccgccctccatcagcacggtgatgccgatcggcaggccggtgcgcagcaagtcccagatcgccttccagcgcggcccttcgaaatgcgagaacagctgcagatgggcgaagcgcctggtgaaccacaggtaggtggcgaaggcgattgcctgcagccacatcatcaccgccgaggcgatgcccatgccttcggcgcccatttccgggaagccgagcttgccgttggccagcacatagcccatcggtgccagcaccagcaggccaccgaagccgagcagcatggtcggcagcgtccagtgcatgccttcactgagatagcgcatgcagaagtacagggtcagcgcaggtccgccccagcgcaccgcatgcaggaacgcggtcgcccccggcacgatgtccggcgcgatgccgaacgacggcagcagcggcggcaccacggtgaggaaggtgaacatgatcaggcccagccccaaggccagccacagtgcctggcggaacagcgggccgatctcgcgctcgcggccggcgccatgcagctgcgacaccgaggcggtgagcgagatcagggtgccgatcggaatcagcatcggcagccacagcagtgccgtaccgatggtgacggcggccagtgtggccgtggcgtggtggccggcaatcacgttgtcgacgaaggagatcagaccggtggacacatggcccagcacaagcggcagggcgagcagaccggtggcgccgacttccttgctgaagcgcggcgtggaggttgcagtagacataaggtgcttgacgcgaactgcggttgcgcgcgaagggcacaggcaccgggttgcgggcgcccatcttacgcgggcggcgcgtgcattcccatgacatggcgtgaatgctgggtttcagccgccccacacaaaaaggggacggaggggattaagtcgtttcaggcccactagtgccggatgcgacttaatcccctccgtccccttttttactggccggcctggcgcttgagccagctgtcgcgctcggcggcgggcacggcgaggaaggcgctgcgcactgcgtcgcgttcctgcggtggcgttcgctgcgcgaccagagtcagctgggccagctgcgccgggctgagctggcgcagtacggccagcgcggtctcgcgctgttccggcggcacgaagccgaacaagccatgcagcttggggaattccacgcccagttgcgggcccagccgccacccgtcgcggaacgcctggtcctggtcgcggaactgttggcgcaggcgctgctgctggtccgcaggcagcgcattgaatcgcgcagccgcttggcggatgcgctcgcgctctccttccggcagcgcccgccaggcggcgtagtcggcgcggcgctggcgctgctgctgcgcatcgagctgggcgaagccagagggtgctgccgtcgacggtgctggcgaagccaccggcgtggccggcgacgtcggtggcggcaacggcacgttcaacgattgcggcgcggcagacagcgacaacggcagggccagcagcaggctggcgaacacggacttattcatcggcagcagcggtttccagcgtggcactggccggctccggccggctcggcctggattgcgattcatccaccggcagcgggccgcccgcggcagtccacgcgtacaggtcggcatcggcaaccagcgggtagtcacgatcggccagcatcgctgcgtcgtccgtggcctgggccgtggtcgcatccggcgtggcgttgaccttgctgggtggcagggcttccaccgtcaccggaccggcttcgcccaccaccccctccggcagcggtgcatcactgccgaaggaatgcccctgccagtggcgccagcccagcgctgcggccaacagtatcgccacggtcgccagcaggatcagcggaccgcgccaacgtggcttggcgttcgtgcgacggcgcttgccattggcggccgcccgctcatcgcgctgcggtgcgcgccagctcggggtcggggcttcattgtgggcggtcgcggcggcgggttgctgcagctgctgcaggcgcgcggccggcaactcacggatacgcgcctgcacctgttcggccaactggcgccaggccgaggcatccggctggccgtgggcatcacgcgggcaggcgtcggccagcaggtgctggtagcccgcctcgtcctggtcgagcacgcgcatggcgatgccctcgtccaggctgccccccacccgcagcagcagcgcaaggcgcggcagcggcggcatcgcgcccagcacggccaacggcggcagccactgcccgcccaccggctcgcgcagcgcctggcgctggcccagaagggtccagaagcgggtcggccactgcgccatcggcaggtcgctggccactgcggcaaaggcgcgcatcaccgccaccagggtctgctcggcacgcgcggcatcgccgcactgcagttcagcgaccaccagggcacggcgctcgacgccacgcaggaacgccgacagcgcgccggccgcggtcgaggaaacaggggcgggcacagccgtcatcggtcactccaaaggtctgccggcatgataacggcaggccatcgacgcccgtaggacttgcgcccacaggcacttcgtgctgcaggttgtgcacagcaccacgccccctccggcgaaaactgtggcttcgggctgaattcactctgtttcagcattgtttcacacttaagatattgattttattgtcttttgttgtgtggcgattttttgaccaacccaagcgtgaggccgtcgccatcggccttctacgtttccgatggccgttaacgcacaacgttatccacagaacatgtggataagactgaatctccaatggacaccgatatttaggtgacatttatgattcaacgggcgccgccccgccgctcccgctgctgccgttcgcgcgcgcatggcccgttacactggcccgatgctttcaccgattccgaccctgcaggtcgccctgcctgtccccctgccccgcctgttcgactacctgtcgccggagggcgatgcaccggcggtcgcggtcggctgccgcctgaaggtgccgttcggcaaccgggagctggtcggtgtggtggtggggcacggccagaccgacgacggccagggactgcgccaggccctggcctggtgcgacccacagccgctgctgcagggggagctgtggcagagcctgcaatggctggcgcgctacacccatgcgccactgggcgaggtgctgagcaccgccctgcccggcccgctgcgccatggcgaggtcctgcccgacacacaccactggggttggcagctgaccaccgaaggccacgcccagcgtgaaaagctgcgcgccggcagccgtccacggcaactggccgagctgctggccgaagccatcgtggatgaggacgtgctgggcgaacgcatgcaggactggcgcaccgccgcgcgcagcctggccaagcgcgggctggccgagcgggttgcgctgagcgtggccccccaacacgcgcagccactgcccggtcccacgctcaacccggaccaggccgaggcggtggccgcgatcactgccgccgacggcttccagccgttcctgctggatggcgtgaccggcagcggcaagaccgaggtctacctgcaggcgatcatccattgcctggcgcagggcaggcaggcgctggtgctggtgccggaaatcggcctgaccccgcagaccctggcacgcttccgtggccgcctcggcatcgccgtgcatgcgctgcactcggggttgaacgacaacgagcgcgcgcgcgtctgggcagcggcctcacgcggcgaagcgcgcgtcatcgtcggcacccgctcagcggtgttcacgccgctgccccaggccggcctgctgatcgtcgacgaggaacacgacggcagctacaagcagcaggacggcatccgttaccacgcgcgcgatttcgccctggtccgggccaagtcgctgggcgttccggtgttgctgggcagtgccacgccctcgctggaaaccctgcacaacgcctacgccgggcgttacacccacctgcgcctgaaacagcgcgccggcgatgcgcggccgccgcgcgtgcgcatcctcgatgtacgcaagcgcccgctgcatgacggcctttcggccgatgtgctggccggcatcggggagcatctgcagcgtggccagcaggtgctggtgttcaagaaccgccgcggctacgcaccggtgctgctgtgccacgactgcggctggaccgcgccatgccagcgctgcgatgcgccgatgaccgtgcatggtggcggtcgtcgcctgcagtgccaccactgcggcgcgcggcaaccggcgccgctggcatgtccggcctgcggcagcctggcactgcaaccgcagggcatcggtaccgaacgcctggaagaacatctcactgcggccttcgccgacttcccggtggtgcgcatcgaccgcagcaccacctcacggcgcgacgcgctggaacagcagctggcgaaactgggcgaccagcccggcatcctggtcggcacgcagatcctggccaagggccacgacctgcccaagctgaccctggtggtggtggtgggtatcgatgagggcctgttctcggccgacttccgcgccagcgaaaaactggcgcagcagctgatccaggtggccggtcgcgcgggacgtgcgcgcgacccgggcgaggtctggctgcagacccatcaccccgggcacccgctgctggaaaccctggtgagcggtggctaccatccgttcgcgcaagccgagttgaaccagcgccaggcggccggattcccgcccttcgcgcatctggcgctgatgcgcgccgaagcgcagcaggtggagcatgccaatgcattcctgctggcagcccggcacctgctgggcgaacagaacgtggtcgaggcctacgggccgatgccggcgccgatgccgcggcgggccggttaccagcgcacgcagctgctgctgtctgcggtgcagcggccgccgctgcatggcgtgctttcgcaactggttccgcagctgtacgcgctgccggaagcacgcaaggtgcgctggtcgctggatgtggatccaacggatctttattgaggggtcagagcccacccgtcgggtgggatccgacccgatgccctggggtcggatcccttttcgcagaaaagggctctgaccccggacgccttcgcttacgtcagcggcgacatcacgccgcgctggtaggccggtcgctcacgcaggcgcgcataccactcggccaggtgcggcaggtccgggcgctggatcggcagttcataccaggcgtacaccagcgagccgagcggaatgtcgcccatcgcgaacgtcccgcccgacagccatggctgcgtggccagggtggcatcggccatcgccaggtagtcaccggcacggacgatggccgcgctgatgcgcgcttcgtcacggtcggccggcgcggtgcgcatgatgccccagaccaggtcgctgtacagcggcgccatccgcgaggtgctccagtccatccacttttcggcctgcgcgcgctccatcgggtcctcggcgtacagcgtgcccagcgcatagcgcgcgctcaggtaacgcacgatggtgttcgattcccacagcggcaggccgtggtcctcgatcaccggcaccaggccgttgggattcatcgcctggtactccggcgtctgcgtgccgccatggctgccgccgacttcgatggattcgtacggcaggccgatctcctcggcacaccacagcaccttgcggacgttgctggaattgcggcggccccagatcttcaacatgcgggttttccttgctggcaatgcgagcggcaacgatacgcctgattggagtggagatgtgcgtgccggatgcgggatcgggcatctacagcatgccggccagcggccggcactaccggttcttttgccggcactaccggttcttttttggcagcgcgcgcacgtaggacgacttgccgtccttcttcagctcgaacaggccgatcgccgccagcagatcgctgagtttgccgtagccatagttgcgcggatcgaacgaggcctggttgccgatctggctgccgaccggccccaggtgcgaccagccatcctcgccctcggccgaggacaccgcgcggcgcagcatcttcaccagccgggtgtcgctgcgcatctccgccccgctcttgcgcgggcgtgcatcatcattggcgacgggctcgttcgatgcctgttcgctcgatgcctgctcggcatccggcacgctggcgtgggtctggcccagcgcttccaggtaggtgaacttcgagcacgcgttgacgaacggttccggcgtcttcttttcgccgaagccatacaccttcacgccgtcggtcagcaggcgcatcaccatcggggtgaaatcggcatcgctcgacacgatggcgaagccatcaaggttgcgcgcgtacagcaggtccatggcatcgatcaccatcgccatgtccgacgcattcttgcccttgctgtaggcgaactgctggatcgggcggatcgcgtattcgtgcagcaccgcttcccagcccttcaaccgcgggctcttccagttgccgtaggcacggcgcacgttggccacgccatagcgggcgacttcggccaggacctcgtcgatcttcgaggccggcgcattgtcggcatcgatcaacagggcgatgcgcttttccggttcgctcatggattcctcgcggacggttgcctgaacccgagtatcgccgatccacccaggcgctgacgtgacaggtggccgccgtgcgaagatgccaggcgcttcccccaatgcccccactggagtgagtcgatgagtcgcgagcgcgttccccacctggtcgttgtcggcggcggttttgccggtctctgggccacccgtgccctggcccgcgagcgcatacgcatcaccctggtcgaccgccgcaaccatcacctgttccagccgctgctgtaccaggtggccaccgccggcctgtccgcgccggatatcgccgcaccgctgcgccacatcctcggccaccagcgcaacgtggaagtccgcctcggcgaagtggtcgccatcgacaagcaggcacggcagatcggcatggccgatggcagcacgctggactacgacagcctgctgctggccaccggcgctacccacgcctacttcggcaacgaccagtgggccgatgatgcccctggcctgaaaacgctggacgatgccattgcactgcgccgcaagctgctgctggcgttcgaacgcgccgaggccgaaccggacccggccaggaaggcggcgtggctgagtttcgccatcgtcggtggtggtcccaccggcgtcgaactggccggcacgctggccgagatcgcgcgccacacgctgcgcaacgaattccgccacatcgatccggccagcgccaaggtgcggctggtcgaggctgggccgcgcgtgctgtcctcgttcccggaagtgctttcgctgaaggcgcgccgccagctggaaaagctgggcgtggaagtgctgaccggtaccccggtgagcgacatcgacagccagggcttcaagctcggtgagcagttcgtgccggcccgcaccgtggtctgggccgccggcgtggccgcttcaccactggcgcgcacgctggacgtgccgctggaccgcgccggccgcgtgcaggtgcagccggacctgaccctgcccgatcacccggagctgttcgtggccggggacctggccgcactgagccaggccgacggcaagccggttcccggcgtggcgcccgcggccaagcagatgggcaagtacgtggccgaggtggtccgtgcacgcctgcacggcaagcccgagcccggtccgttcaagtacgccgactacggcaacctggccaccattggccgcatggccgcgatcgtgcacctgggccggctgcagctctccggcgtgctggcctggtggttctggctggccgcgcacgtgttcttcctgatcggcttccgcaaccgcatcgtggtgctgctgaactgggcggtcgcgtactggagctaccagcgcagtgcgcgcatcatcttcggtgatgatcaggacgaccggcggccgaagcggtaaggccgcacgcaacaggggtcggatccctttccgcgggaaagggctctgaccccgtcaacaaacatggagcgccatccacgcatggcgtggatctaccggttcatctggccaccgggcacccgccgtttcgaccaggtccggcagaagtcctccttcctcgcggtgtccgcaatctgcgcggtactccaatgccgggtgatccagatcgccaacccggtgctgctgagatgccagcgcagcatgccgcgccgaggttgccgccacaggtggcgccgggcaatccagaaggcctcccgctccacttcaggcaccttgttcttcatcccgtccttgtcgaagaactgggcggtgaagcgccaggggttcatcggctggtatcccgcccgtggctcaccgctgcacgcagccacaccactgggcgcgcggtcggccggcttcggccgaccgtccaccaatgccagcccgagcagatacagcaggccaggcagcagcgcgatgccggcgaccagcacgacgacggagatccatgcgttgccggcggcacgcatcgctcactgcgccttcggcttcgggtaccacagtgcgttgacgatgacccagcgctggtcgaaacgccccatgtggaagtagtcgacgaaccacggggtttccagccgcaccgaggccgcgttgccggtcacgtccagcaccgtgcagcggcgatcccattgatccttcgggtcttcagcgcgccctgtttcgtcaacgagaccagctcttccttcgacatccggcgcaggcccaggcgctcgtcgggtgtatcgccgagcacagcgcgcttggccaggtccggatgcagggaacgggcgacgcgctgcgggtcggcctccagctggccatcgacgtagtcgtggcaggtggcttcgatgtccgcgatcgtggcggggtcggcggcagggctcgttgctgcggaaagcgcgaacagcagggcaatcgtggacatccgggtctccggctctgggcgcgggcggatcatcgcatgggccgaacggcccatccacgcatgacgtggatctactgtagagccgagcccatgctcggctcccgcatcgggcagacggaacaacagccgagcgtgggctcggctctacagaagcgcaggatccgttgcctgcagccaggccagcttgcgttcgcggggctgctgcttgagttgccactcggcccgcgaggcggcggcccggtccgggtattcgcgcacggccagcacgcgcagcggcggccgggcccgggtgtagcgcgcgcccttgccggcctggtgggcggcgaaacgcgcctccacatcggtgctgatgccggcgtaatagctgccatcgcggcattcgagcaggtacaggaaccacgggcggagggatggggccatgcctggattatgccgtgctgcactgcagcggatatactggcgcccgaatgcaggagagaggcgccgcgctggcgcccgccgaaggcgcaggctcccatgatcgctcaggccggtgggctggaatcccaccaaccatgcattcgactcgccgagctggagagaggtcaccgggcatgcccggggcgatccgccgaaggggcacgcggcccatgccgctgaactctcaggcaaaaggacagcgggagcggcaccggtcatcgtcatcccgtcattgcgcaggcagtggcggtggtcgcgcatggccggccccaccgcgcccggagcctgtcccatgctgctgtccatcatctacctgatcgccatttccgccgaagccatgaccggcgcactgtccgccggccgccgccgcatggacctgttcggcgtggtcatgatcgcctgcgtcaccgccctcggtggcggctcgctgcgcgacatcctgctcggccactatccgctgggctgggtgaagcatcccgagtacctgggcttcaccgtatgcgcggcgctgatcgccacctgggtggcgcgctggatgcaccacttccgccgcaccttcctcgtgctcgatggcctgggcctgatcgccttcaccctgatcggctgctcgatcgcgcgcgaagccggccatgcaatgccgatcgtgctgatcgccggcatgctgaccggcgcgttcggcggggtgctgcgcgacatcctctgcaacgaggtgccactcatcttccagaaggagctgtacgcgatcatcgcgctgctgaccggcgcggcctatctgttgctgctgcactggggcgtggccgatgccaccgcgatcctgtgctgcctcggcggcggcttcgcgttgcgcctgctggcgatccactaccgctgggaaatgccgaagttcgtgtaccacgacgaagtgcattgagcctcttcgtaaagtcgagccatgctcgactgctctttgcaggaaaccaacgcgcttcgcgcgcaggtcgggcatggctcgacgctacaggaagcggtatcaccaccccggcgatgtacctggcgctgtcgctcatgcgcagcgccaggcgcatcgccggtgcagatgggccggcctccaactccgaccggccctgatcgcggccgcacccccgcaggcgctggccgccatccacacacgtgccgcactcaggcggcttcgatcaggctgcttcggacaccttcacgtcgcgacgggcgcgcacggccgcagccagacgctccagcaccgtcacggtggtgtcccagtcgatgcagccatcggtgatgctctgcccgtaaaccagcggctggccttccaccagttcctggcggccaccgaccagatggctctcgatcatcacgccaacgatgcgctgttcgccgtcttccagctgaacagcgatgtcctcgatcaccttcggctggttctcggggtttttcaggctgttggcgtggctggcgtcgatcatcaggcgcgtcggcagcttggccttggccagcacctggcaggcgtcggcgacgctgccggcgtcgtagttcggctgcttgccgccacgcaggatcacatggcaatccggattgccggtggtcgacacgatggcggtgccgccctgcttggtgaccgacaggaagtgatgcggattggacgccgcacccaccgcgtcagcggcgatcttgacgttgccatcggtgccgttcttgaagccgaccgggcacgacagccccgaggccagctcacgatgcacctggctttcggtggtacgcgcgccgatcgcgccccacgccaccaggtcggcgatgtactgcggcgagatcacatcgaggaattcgacaccggccggcaggccgagcttgttgatgtcgcgcagcaggccgcgggcaatgcgcaggcccttgtcgatcctgaagctgccgtccaggtccgggtcgttgatcaggcccttccagcccaccgtggtgcgcggcttctcgaagtacacacgcatgacgatttccagttcgccggccagcgcgtcgtgcagcggcttcaggcgctgggcgtattcgatggcggccttcgggtcgtggatcgagcacgggcccaccaccactgccaggcggtcgtcacggccgtgcaggatctggtgcagggccgcgcgcgaggcgctgacggtgtcggaggcttcatcgtcacagggcagcatcgccagcagttgggcaggcggtgtcagcggttcgatggtgcggatgcgcaggtcgtcggtgtgcgggggcattgcaggagatctccggaacgttggggtccccagcgtggcggcatgaaaaaagccgccaggttcgctggcggctttcgggaatgcgtctgaagctttcttcagggtgagcgcagtccttcctccgccagtggcttcggaaagtaataccagtaaaagcgggtggcggctgcgttcatggggtgtattgatagcacagcttttgcgcagtgcaaaatgtttcatccgcaaccgcgggtgcggttcagcgaggcgcgcgccggcgctgcccacgcggcagcagccacgcaaagctgctcatttgccatgcacttccacgtccagcaacaggccttcgtggatgtcggcccagcgctccagcacgcggtccagctcctgcctggcctcgtccagctgctcgggattgagcagggaacgggtggtgtagaggtcggagaccaaccgccgcagggccgcctccgggatggccaccgacggcccttcccgccccggcaactgcaatgccgggctgtcgccaagcgggccgaacagcgtgacctggagcgtgctctgcatgatcaacttccctgcggatggacatgggcaatgtcctgtttaccgcgtccgggtgacaggcgcatgtgccatgcgcgtccggagacgctgctacaaggcggccaggtcggcaaggtgctgccccatcccatcgtctgcgccgacggcgttgatggtggcgaagtactgatgccaaccggtggcggcaatgccggccaccagcgcatcggcgtccgcgcggcttgcacagcgccagaccgcatagaactgctcatcgctgccgtgctgtacgcccctggcaatgcggcccatcgccagcggtgtgatgcggaccggatcgaactgctgcatgcctgcaccgatacgggcgaagaaggcattccgctgctcgggctggagcgtggtccaggcgggggtggcggtatagagctcgatgaaggtgtgcgacatgctgcttcttccttgaaggtttggggggttgccggccagcggccggcactaccggagcgagcgcatggcgcgtttgcggatgtaggcattggcatcgccagggtgctgctgttgccagcgcgcgcacagcgcacgcagccactgcggctgtgtcttgccggcatcattgagccagttgccgaccgagtcctgcacatagcgctccgggtcgtcggcgagtgcttccagcatcgcctctgcaagttccggctgccgcttgaacagcgcgacatgtgtggcccacacgccgcgcgggcgcagcgcttcgcaggcgaagcggcgcaggtacggcgatccttcctgcgtccatggttgcaggtactccagcgcctgcagtggtgcggcaacaatgtcggcacgcagcgccagccacgcccattcgcgcacgccgaagtgcgggtcgtcagccagtggccgcatcgcctgcagcttggccggcagcgtcgcgtcggcgtcgccgccgatcaggtagcaggcccagccacgcaccgtgtctgacgcatgcgcctgccagcgcgcaggctccccctgtccggcttcatgcagcaaccgcgccgccagcgccatgcgctgggtgatgcccttgcctgaggcgtcgcgcatgcattgcagcgattccggctcaagggcaggcgccaccacctgcagcagcgcggtgaaatccacggccaggcattcggccagatgggtggcagcagcgctgccactgttgagtgcatgcagcctttgcgcaggaacgggcgtgctcatgctgccgattcccgcccgccgtccgtgtgctgccagacgttgtgcagcagctgcgacagctgctgctgttcacccgcatccaggccgtcgaacaggccgctgatccattgcgtgtgctgctcgaacagcgactcggccaagcgctttcccggtgcggtcaatacgatctgcagacggcggccatccccgtcatcgctgcgacgctgcagcaggccttcacgctgcaggccatcgagcaggccgctgatggtggcacgggtcacgccagcacgctcggccagcaggtgcggcggcagcgtgccaccggccccgtgcagcaggaacagcacgacgaagcggccctcgctgagcccatgcggtgccagccgcgcggcgcagtcgcgatcgatcgacgaggacaacgagagcagctggaagcacaggcgcagttgcgcgatgttggcgtggccgcgtcgctgcgattcctccagcagggcctgatgcttggcttcgatcatctcacgaacgcgatatggttaggcgcctaatcatatcaccggatagccgctacctgtaaatcacagccgatatcaggggagctttcccagcagcaggcgcgcgatcagcccgccaccctcgcggtgcagcagctgcagttcgcctgcgtgacgcctggccacgttggcggccatggccagtcccagcccggtcccaccggtagcgcgactgcgcgagctttcgctgcgctggaacggttgcagcaggcggacacgatcagcttcggcgatgcccggcccgcgatccatcacatccagctgcaccccatgtccccacacggcgacatgcagctccacggcgcccgcgtaacgctcggcgttgtcgatgagattgtcgaccgcgcgccggagcagcagcgcatcgccatgccacggcagcgtatccgggcactgaagcgaaatgtcgaccccgcgcagcagcgccccttgcaggcattcctgcagcagggcagccagatccagcgagcgcatctgcaagggctgcagctcgccgcgtgcatagtccagcacctgctcgatcatcgcgtccatgcgttcgatgtccgccaccatccgggcggcctgtggtgcgggagcgaactcggcgcgcaggcgcaggccggtcaggggcgtgcgcaggtcatgcgccactgccgccagcatatgggtcatgtcctgtgcctggacccgcaggcgttcgcgaccggtgctgatcgcggcggccagcatctgcacttcgcgtgggccatcgtcgggcaatggcgactcggcctgcaggtcgacgcgtgcgctcgcttcggccaggcgccgcagcgggcgccccaaccggatcgacgcccacgccgccaacggcgccaggaggatcgcaccgcccaacagggcgagcatcacctggcggcgccaggccgccaggtcactatggtcgctgccgaccacccgccagcggccgtcggcctggcgcatccccagttcaaacggcggccactgcatcgcggtcagcagcgcggcctgtgatttcagcacgccagcacgaccggaggcgtccagtaccgcgccaccctcgatgacctgcacatcgggcgccctgccctgccccgtccatgccaggcgtacatcctcggccggcatgcccatctgcgcggccgccagctgcgcgagccagtcgctggcgctaccttgggggggcgcgtcctgcgtcgccctgcgcaatcccagtgacgccggcgcctgttccccacgcagtacctgcatcgcatggtccagccgcatcggtggcggcgcgggccggggcatccaacccaccactgcaacgctggccagggttgccagcagcaggctggccagcgccagcatcgcgatccagcgtgtggtcgaccaccggctgctcacagcacctgtacctcagcgtcgaagcgatacccttccccgcgcagtgtctgcacgagggcttctgccccggacgcggcctgcccgagcttgcggcgcaggcggctgatcgcgaggtcaatggcacggtccacgctgtcactggcttctccgcgactcaactgcagcagctgctcacgccccagcacccgcccgggacgttcggccagcgccagcaacagggaaaactcgccacgactcagcaccagctcggcaccgtccggtgcgaacaggcgacgctggtcgggcagcaatcgccagccatcaaaccgcagctcgctggccacctgcgtgcgcagcttgtcctgacggcgcagcagtgcgcgtacccgcgccagcagttcacgcggatcaaagggtttggccaggtagtcgtccgcgcccatctccaggccgatcacgcggtccggtgcagcccccatcgccgacagcatcaggatcgggatcgccctcgcctgcagcctgcggcagaccgacagcccatcctcaccgggcatcatccagtcgaggatgatcaggtccggtcgttcggcctgcagcagcacgtccagtgccgccgcatccgccgccaggcgtacctggtagccgtgcagcagcaggtggtcggcgatggcgtcgcggatgctggcatcgtcgtcgacgacgatgacacggatgggagtactcattcggacagtatccagcacctgtgtatcaggacggtatcaacgccgatattccggcgatacgccgccgtgcgccaatggtcacccacgatcactgcggagtcttcccttgcgcctcttcctgttgcccctgttcgccgctcccttgcctgcgctcgcctccaacgccgccgcgcacatcctgccgatgtggatgcagggcggtcatccggcggtggccgtctcgctggacgggcgcgccgaaccgctgcgcttcgtggtcgacagtgccgcgggggcaacgctggtcgatgcccgcgtcgtgcggcgctatggcctggaggatgcggatgcagaggtatcacaggcgcaaggggcgagtgcagcttcggcgcggttgcagcgcatgcgcagcacgtcctggcagctgggcagctggcagctgcaggcccaagccatgaacgtcgatctgtcatcgttgccgaaggatgatgatccagccatcgacggcttgatcggcaacgatctgaccgggcgctgggacacccgttgggacttcggccgcaatcaactggcgctgtggacacccggcggattgaacctggaaggaccgggttgccagcccaatgcgctgcccggccgcactggcggcctgcgccagttcggcttcatcacgcttgcactgggcgcgcctgcggtggacgccatcgccgtggtcgacaccggtgccgcacagaccgtcctcaacgccgaagccgcccgcgcactggggctgcgcaccgacggcagcgacgcgcgggtgcgggtgcgtgaaaagggcaccgaaggcctgggcggcggcaagcaggcaacctggctgtacaccctgcccggcatgaccggcggcggctggcagcacccgtcgatggagatccgcatcagcgaactgccggtgttcaaggcgatcggcctggagggccggccggcgctgatcctcggtgccgatgcaatgcgcggcggccaggtggacatcggtgccggcgcggcgcggatctgcctgcgccggccgcaggccagctgacatctggcgatgacgccagcggcagcccggcgtagcatcaccgtgcgccccaccaggagttccacgcatgtgccgtgccaccctgatgttgctgacgctgctcccgctggcggtactggccgcgccgccacccgtgccctcgcccactcgcatcgatgccgaagcacggcggctgatgcaggcggcccatgcgcgcgggatggcgctggcggtgatcgatgacggcaaggtggtgcatgtggccgcctacggtgaacgcaacgccgcaggcgagccgctgcgcaccgacaccgtgatgtatgccgcatcgctcaccaagatggccttcggccacctggtcgcacagctggcgcaggacggggggatcgatctggatgccagcatcgccacagctctggacgtgccgctgccagactacccgcccgaaccgaagaagtacgccgactacagcgtgctggcgagtgatgcacgctggcgccggctcacgccgcgaaagctgctgaatcacgccagcggctttgccaacttcggctttctcgaaccggatggccggttgaagttccacttcgagcccggcagccgctacggctattccggcgagggcctgatcctgctgcagttcgtgatcgaacgtgggcgactgggcgaggatgtgggtgcgttgatgcagcagcgcgtgttcgatcgcttcggcatggcgcgcaccagcatgtcgtggcgcgcggatttcgccggcaacctggccgatggctggaccgtcgaaggcaatacagagccgcacgatcaacgcagccgtgtgcgggcggcaggatcgatggataccaccatcaccgacatggcccacttcgccgccggttatgtgcgcggcgatgggctgtctgcggcaatgcgcagggaactggtgcggccgcagctgccgatcaccaccgccagccagttcccaacgctgcagccggagctgcccgttgcgcagcagcaccgggatctggccgcgggcctgggcgtggtgaccttccgtggcccccagggtgcaggcttctacaagggcggccacgacgatgcggtcggcaacaccctggtgtgcatcgagcggcacaaacgctgcgtggtgatcctgggcaacgatgtacgggccgaggccaccttcccggcactggtggcgttcgtgctgggtgataccggcgtgccatggcagtgggagtacggcgcggcgaaggccttcgtcgaatgaaggcgcgatgatccctgggcggggagtgcggagggatgggagcaaccatgcatggcgtgtggatccacctcacgcgtggatgcctgctccgctcagcgcgcctgctcgaagaacatcaggtacaccagccggccattctccgggcggtcgccgaacgctggcccggcggtatgccagaaccagggccgcagcagcaccagccggttgaaacgcatcgggatgcgcatggtcatttcccactggctgtcgtcgttgctgtcgcgctcgatgatgtcacgatgcatgtcgccgccgttggcatagcccaatgcggccagctccgctgcatccagggccatgcgctcggtgccggtacggcggtggcggaagaactcggtgccgccctcgcagtgctccggtgcactcaggtagaggatgcccgaccagtgcgagtgatcggcgtgcaccttggcgcggccggtgtcaccggccagggtaaggcggaacttgccatgcgactgcagtgggttgaccggccgcagcggttcgttgaccagccgcgagaccgcgccggacagcccatccagttccagccgctgctgcgaattgcggccggggaatgcaccctcctgcaccggataggtcaggcccagcgccgcctggcgcagcccctgcgcatcggcaggagaaaggaagtcgtcgacgacgatgaaggaggtaggcatggccaccgagcgtagcgatgcgctgctgcggcggcaaccgggcaacgaaaaaccccgccttgcggcggggttcttccttgcatcgggagggcgtgccgaccagggtcggcaacgaccgccggggacgtggacttagaagtccatgccgcccatgccacccatgccgcccatgccaccggcgccacccatggccggctcgtccttcttcggagcttcggcaaccatggcttcggtggtgatcatcaggccagcgatcgaagcggcgttctgcagcgccgaacgggtcaccttggtcgggtccaggatgccgaactgcagcatgtcgccgaactcgccggtggcggcgttgtaaccgaagctgccggtgccttccttgaccttgttgatgatgaccgacggctcgtcgccggcgttggccacgatctcgcgcagcggggcttccatcgcacgcagggcgatctggatgccgtggttctggtcttcgttggcgcccttcaggccggccagcgcggtgatcgcgcggaccagggcaacaccgccgcccggaaccacgccttcttcaacggccgcacgggtcgcgtgcagggcgtcgtcgacgcgatccttcttttccttcatttcgatttcggtcgaggcgccgaccttgatcacggcaacaccgccggccagcttggccacgcgttcctgcagcttctcgcggtcgtaatccgaggaggtgtcctggatctgggtcttgatctgcgccacgcgtgcatcaacgttggccttgtcgccgacgccgtcgatgatggtggtgttctccttggagacctgcaccttcttggcgcggcccaggtccttgatggtggccttctccagcgacaggccgacttcttcggagatcacggtgccgccggtcagcacggccatgtcttccagcatcgccttgcgacggtcgccgaagcccggggccttgacggccacgaccttgacgatgccacggatggtgttgaccaccagggtggccagcgcttcgccttcgacttcctcggccacgatcagcagcggcttgccggccttggcgacaccttccagcaccggcagcaggtcacggacgttggagatcttcttgtcgtgcagcaggatgaacgggtcatccaggtcagcggtctgcgactgctggttgttgatgaagtacggcgacaggtagccgcggtcgaactgcatgcccttgaccacgtccagttcgttgtccaggcccgagccttcttcaacggtgatgacgccttccttgccgacttccttcatcgcgtcagcgatgatctggccgatcgactcgtccgagttggccgagatggtaccgacctgggcgatcgccttgtcgtcggcggtcggcttggagatgttcttcagctcggcgacggcggccgagacggccttgtcgataccgcgcttgaggtccatcgggttcatgccggcggcaacggccttggcgccttcgcggatcagggcctgggccagcacggtggcggtggtggtgccgtcgccggcatcatcgttggtgcgcgaagcaacttccttcaccatctgcgcgcccatgttctcgaacttgtcagccagttcgatctccttggcgacggagacgccgtccttggtgatggtcggcgcgccgaagctcttttccagcacgacgttgcggcccttcgggcccagggtggccttgacggcattggcgagaacgttgacgccgcgcaccatgcgcgaacgggcgtcttcaccgaaacgaatatccttggcagccattgcatttacctcattggtagcgccggacgatgcccggcggctgggagtttgggatcaggttgaaacaggtcgcgccggggctcagccgatgacggcgagcacgtcgtcttcgcgcaggaccttgtattcgacgccttcgctcttgtacgagctgccggcgtactggccgtagatgaccttgtcgccgaccttcagcgacggcgcgcgcacgttgccgttgtccagcggcttgccggggccgacggccacgacctcacccttggtggacttttccttggccgagtcggggatgacgatgccaccggcggagatttcgtcggcttcgatcggcttgaccacaacgcggtcgtgcagcggcttgatgctcataggagacctcttaagtgattgattggtctaaaaaagtccggcgatgttagcactcaccccaggcgagtgccagaaccgcacgtgaagaaacccgacaacgtcgggagcagggcagagatggagccccgccgccccctttcaagggcggaatgaaaaaatttttccgcccgcgcgcctcggccaaggcgtcggtcttggacaatttcggtgacaagcgtcgcactgtcagatatctgacgttcatttacgacaaagtgtcactggatcggccttaggctcggtcaggcattcccaatcacaaggagtagtcgatgcgattgctgtccccgcttgccgccgcctgcctgctggcactggccgccgcgccggcccaggccgaggttttcatcaacgaactgcactacgacgacagcaccgccgccggtgacgtcggcgaagccatcgaagtggtcgccaccgccggcgaggacctgtccggctaccgcctctacctctacaacggcagcaatccttcggcggccgcggtctacgccaacaacccggtcccggccggcaccgccgccggctgcggcagcgcgaccatcgccgtggtcaactacccgaccaacggcatccagaacggccccaacgacggcatcgccctggtcgatgccagcggcaaggtggtccagttcctcagctacgagggcgccatcaccgcctccggtggccctgccgccggcatgaccagccagaacatcccggtggccgagaccaacagcacggccgcgggcacctcgctgcagctgaccggcagcggcagccagtacacccacttcacctgggccgagtcggccaggcagaccttcggcagctgcaacaacggccagaccttcagtggcggcggaaccccgggcccgaacacaccgccgtcggtctccaccaccaccccggcgcagggcagcagcaccttcccggccgccgccgacctggaagtggtgttcagcgagacggtgaacctggccagtggcgccttcgccctgagctgcggcacctccggcagcgtgccgttgaccttcccggccagcggccgcagcgtgaagctgtccaccaacactgcgctggtggccggtgaggcctgccgcttcgacatccgcgccgcgcgcatcaccgacctgcagggcgcgcacccggccgccgacagccgcatcgccttcaccgtggccagcaccggcggcaatccggacccgggcaacccgggcgtgccggccggctattactccaaggtcaacaccagcagccccagccagctgcgctgctcgctgcatgccaccatcaagggccacaccgcctacccttacagcggctcgggcaccagtacctggaccattctggaaatcgccgacgaggatccgaacaattccggcaggatcctcgatgcatatcgcaaccacagctacgccaaggtgaccgatcgcgccggcagtggcagtggcctgaagtacaaccgcgagcacacctggccgaactcgctgggctttgccaccaccaccggtgacaagggcctgccgtacgcgccgtataccgacacccacatgctgtacctgaccgacgcgcagtggaacgccgaccgtggcaacaagccgttcggcaagtgcgacgccaactgcggcgagcgcgccaccgaggccaacaacggccagggcggcggcagcggcggctatccgggcaactccaactgggtgcgcacgccggacggcaacaccggcaccttcgaggtgtggggcaagcgcaagggcgacatggcgcgtgcggtgatgtacatggcgatccgttacgagggcggcaaggatgcggccaccggccagtccgagccggacctggagctgaccgacgaccgcagcaaaatcgtcaagaccagcagttcgccggcctacatgggcctgctgtccacgctgatcgactggcacttgtccgatccgccggatgatgccgagcgtgcgcgcaatgacgtgatctacagcttccagggcaaccgcaacccgttcatcgaccaccccgagtgggcaaccccggccctgttcacctcggccaagccggccacctgccagctggccaactgaccgcgcaacgcagcggtccactgccgccgccgggccctgacccggcggcggccctatactcggcggtcatgtcgaccgtcgatcccgtcctgctgctgttgaccacctgcccggaccgggccagtgccgagcgcatcgcgcacgcgctggtcggcgagcgcctggcggcatgcgtgacccgcctcgatggcgcgcagtcgacctaccgctggcagggggaggtgaccaccgacgccgaactgcagctgctggtgaaaaccaccgcgagccgcgtcgatgacgcaattgcccggatcgtcgcactgcatccgtatgaactcccggagtgcatcgcggtcgaaacccgggccggcctgccggcgtatctggactggatccgggcacagacccgggaggacactgattgaagactctgtttgcgcgcggcgccgccttgtgcgccctgttgtggctctcgctgccggccttcgcgctggatgagaaggacctgctgccggtggaccaggcgttcgcgctgaccgccagtgcccccgaacggggccaggtgcaactgcagttcaagatcgcaccgggctattacctatatcgccaccgcaccagcgtcaaggccgacccggccttcaatgccggcgcgctgcagatgcccaagggcgacaagcaccacgacgatttcttcggcgaagtcgagacctatcgcgagcgcctgcaggccaccctgcccggcactccgtccgaggctgccggcaccatcagcctggaagtgcgttaccagggctgcgccgatgccggtgtctgctacccgccgcagaagcgcgtggtgcaggtcaccctgccgggcgccggtgcggcggcggcggtgcctgccgcgcgtgccggtgcggccagcccgttcaacaacccgctggccggtgccggcaacagcggtggcctgcgcctgccgggcgcggccaacaacagccaggccctgccgctgccgtcggaacaggcgttcggcttcgatgccatcgccagtgacggcaacaccctgctgctgcgcttcagcccagcgcccggctattacctgtatcgcgaccgcacctcgctgaagctggaaggcagcgccggcgtgctggccggcaagccgcgctggccagccgcgcaatcgcatcgcgacgagcacttcggcgatgtctcggtctacttcaaccaggtggaagtgccgctgccgctgcgccgcactgtcactgatgccgtcgacagcaccctggtggtgaccttccagggctgccagaccgatggcatctgctacccgccgatgacccgccgggtgaagctgtcgattcccgctggcaagctgtccgccagcattgaccaggcgccagcgcgcaacgaggtgatcagcccgctgcccgccgccggcgtgccacgtgaatccgccaacggcgcaccgttgcgcctgctgccgaccgtccccaacgacggcattgccactcccgccgccagcggcagtgagggcgcgcgcaatgagttcgccgccgacgcgcgcgatggcaacgcactgcgcacgcgcccaccggcgacaaccccgaacccggaccgttcgttcgtgtgggtgctgctgctggcgctggccggtggcctggtgctgaacctgatgccctgcgtgctgccgatcctgtcgctgaaggtgctgagcctggcgcagagtggcgaaagccctgagcgggcacgcagccatgccctctggtacacgctgggcgtgctggtcgcgttcgcggtgatcggcgcgctgatggtgggcctgcgcgcgatcggcaacgccgtcggcatcggcttccagctgcagcacccgggcgtggtggcggcgctggcctacatcatgttcgcggtgggcctgagcctgtccggcgtgtttaccctcggcggtggcatcggcaacctcggccagtcgctggccagccgcagcgggccggccggcgatttcttcaccggtgcgctggcctgcctggtcggcagcgcctgcgtcggcccgttcatgggcggggcgatcgcctatgccttcattgccccgccgctgaaggcgatgaccgtattcctgttcctcggcctgggcctggcgctgccgttcctgctgatcggcttcgtgccggcgctggcacgccgcctgcccaagcccggcccgtggatggaaacgctcaagcacgtgctggccttcccgatgtatgccaccgcgctgtggctgctgtgggtgctgggcaaacagcgcggcgtggacggcatggcactggtgctgggtggcctgctgctgttcgccttcggcctgtggctgttcgagcgcaatcgctggaccggctcgcgtgcggtgaccctgctcggcgtgctgctggcgatcggcgcgctggttcctgcctggggcgtgacccagctggcaccaccggcgcgggccgcacaggccgccagcgagaacgtggtcgagtattcgccgcagttgctggaccgcctgcgtgcggacaaccgcgtggtgttcgtcaacatgactgccgactggtgcgtgagctgcaaggccaatgaacgtgccgtgctgtcgcggccggagttcaaggaactgctcaagcgcaccaacgcggtgtacatgcgcggtgactacaccaacgtcgacccgcagatcaccacgttccttgaagagcacaaggccgtgggcgtgccgctgtacgtggtgtacggcccgggggcgccgccgaccgtgctgccgaccctgttgacccaggcggtggtcgaggaagcgctgctgcgcaccgcacgatgaagtggcaacggccagcgctgctgtggacagcggtgctggccgccggcctcggcctgtgggccgggcatcgattctcacccggcccgtctgcaccggccgcggcaacgacggcttccacagcgacggccgtgaagcctgccctgcaggtgggtgatcccttgccggcgctgatcctgccggacctggcggaacagccgctggacctgcgcgcccgcttcgccggccggccgctgctgatcaatgtctgggccagctggtgtgcgccctgcgtggaagagatgcccgaactggcccgcttcgccgaagcccagggcgacaacggtgtgcaggtgctgggcattgcgctggatgctccggacgacgtgcgcgctttcctgctgcgggtgccggtggactacccgatcgtggtcgagacgccggggccacgcgatgccagcgtgcagctgggcaatacgcagggcctgctgccctacagcgtgctgttcgatgcacaggggcggctggtgaaggcaaagctggggccgttcgcccacggcgagatcgacggctgggtgaagtgagggtgtttttgcagggcttgcagccctgcaccctgctcaatgcaacggcaacagccaaagcgggctttccgtgggatggcggggcgctgtggccgtgcaggacacgccgtaaacccgtccgtgggggctcgatggcgccatccatggcgccaacggtcctgcacagccacaccgccccaccttcgacagattccggcggctgttggtaggtgtcgaccttggtcgacacatctgtcagatatcgatattcagaacggaatcagaccccgtgccgaccaacggtcggcacccaccaaagcagaacgtcgttccgacagatcgcaggaaactgtcgaaggcggggtgggtccggttgagggggcgtgagcgccatggatggcgcgaccgagcctccatggacgggttcacggcgtcctccgcaaccggacccaccccgcctacctgctaaaaatccactgtttgtgctgttgccggccagcggccggcactaccgcgggtgccgggcgcagcccggccggcaacccctgcttgaccgcaggcagggcgccacggagaattccgcgactaattctcatttgctgttgcgcaggatgcgggcggcagcctcccgggcccctctccttcgatgttcaagaacgtcctgttccaactgcattggctgctgggcattaccgccggtgccgtcctggccctgatgggcctcagcggcgccatgctgtccttcgaggacgagctgctgcgcgcggccaatcctggcttcgctgaaatcgccgagcaccatgcggacggccagcatccccttgcactcagcgaactggtgccgttgctgcaggctggcagcgagcgccccctgcaacgccttcgcgtggatgccaccggacagcggccgtcggtcgcgcgctttgccggcggcaaggaacactgggtgtacttcgatccgtacagcggcgagcgcttcagcgccctgcgcgggcaggcattcttcgacgtcgtcgaggacctgcatcgccacctcgctgccggtgagcgcggcaagtggatcaccggcagctgtgcaatcgcgctgctgttcttcaccctgtccggtctctacctgcgctggccacgacgctggtggcactggcgcagctggctggcggtggagtggacgcgcagcggccgaggcttcctgtggagcctgcactcggtggtcggcacctgggtgctgctgatctacctgatgagtgcgctgaccggcctgtggtggtcgttcgactggtaccgcaacgcggccaacacgctgctcggtgtggcgccggcggcaaagcacacggttgccgccgacgcggcactggacgtccatcgcatcgaggccacgctgtacgcgctacccggcgtgcgcaccggcttcatcgacctgcgcctgccggagaagccggggcaggcgctgaacgtgcgggtgatggccggtgatccgtcgcagcgcggcggccaccacgaccgtgcgcatgacctgctgcagctcgatccggccagcggcgcggttctcgatgcccgcccgtacgcacgccagggcgcgggcggacagctggccaccagcgtgttcgcgctgcattcgggcagctacttcggtgtgcccgggcgcgtggtggtgatgctcagcagcctgggcatgagcctgttcttcatcaccggctggatgctgtacctggaccgccgccgcagccagcgtgcagcgcgagggctgcgccgcgcgctgccggccacgaccaccgatggccgtggtccgccgtggctggtggtgcatgccagccagagcggactgggcgaacaactggcgtggcgtgcggccgcgcagctgcaggcgtccggtcatgcggtgcaggtgcggtcgctggcccgcgtcgatgccgcgacgctgcaggccacgtcccaggcgctgctcgtgctgagcacgttcggcgacggcgagccaccggatgccacgcgccgcgcggcgcggctgctgctcgcacaacgcctggacctgtcgcgcctgcagttcggcctgctcgcgctgggcgaccgccagtacccgcattactgcggcttcggccgccagttcgatggctggctgatcggcaacggcgcgcgcccgctgttcgagcgcatcgatgtcgatgccgcttcggtgccggcattgcgccaatggcagcagcagctgggtacgctcaccggcatcgtcaccgatgacagcgtgctgcctgcggctacgcagatgcatgagtggcgcctgctcggccgcgaccacctcaacccgggcagcgtcggcggagccatctggcgtatccgtcttgccgcaccggccgacgtgcagtggcaggcgggtgacatcctgcacatcgcaccccgccacaacgcgcggcatgccggtgccgtgctgaagggacacggtctggatccgctgcagcccctgctggtcgatggccatccgcgcacgctgctggcgctggccagtgaacgcgagctgcccgaggccgatgccgcgctggcggtgcaggatgcctgcctgtggctggccgggctgccgctgctgcccagccgcgagtattcgatcgcctcctgcacggatgacggcgtggtggagctggtggtgcggctggtgcatgacgcctccggtcgcgccgggttgggctcgggctggctgtcgttgcatgcaccgatcggtgccggcatcgtcgcccgcgtgcatcgcaaccccggtttccatcgcgtcagcggcgcgccgatggtgctgatcggcaacggcaccggcatcgccgggctgcgcagcctgttgcgcgaagctgcccacgcaggcgagcgcgggcactggctgctgttcggtgaacgccagcgcgcacacgacttcctgttcgccgacgagatcgaagcctggcaggccaatggccatctcacgcgggtggacctggcgttctcgcgcgatggcgagggtggttacgtgcaggatcgcctgcgtgcggccgtcgatgcgctgcgcgactggatgcagcgcggtgcggtgatccatgtctgtgggtcgttgcagggcatggccgaaggcgtggaccaggtgctgcgaaccgcgctgggtgatgaggcggtggaaacgctgctggaaaacgggcgctaccgccgcgacgtgtattgattcctgccgccgaacgctggtgtgagccgagcatgggctcggctctacagtgttcgtgcagccgatgtagcgccgagcccacgctcggctgactaggccgccgcgcgcgcctgcggcatcgactgcaagcggaacgcgcccacggcttctgccaaggcacgcacctgcgcctgcatctgcgcagtcgaggcccccgcctcttccaccaggctggcgttgcgctgggtgctggcttccatctgcacgatggtctggttcacctgtgcgatgcccgcatgctggtcctgcgacgcactgcggatacctgccagcagctcggccagctgctgcacgctgccgacgatctcgcccatcgtggtgccggcctgcgcggcctgctggttgccctggccgacacgcgccaccgaatcctcgatcagccccttgatctgcttggccgcctcggcactgcgctgcaccagcaggcgcacttcggcggccaccacggcgaagctgcggccctgctcgccggcacgcgccgcttccaccgccgcattgagggcaaggatgttggtctggaaggcgatgccgtcgatcaactgggtgatgtcgccgatccgtcgcgaggcttcgctgatgccatgcatggtcgcgaccacctggccgaccgcctcgccaccccgctgggccaccgccgctgcgccctgcaccagggcatcggcgcggcctgcggcatcggcgttgcggccgacggtatcggtcagctcctgcatcgacgccgcggtctcttccaggttggcggcctgctgctcggtgcgccgcgacagatcgtgatggccggcgacgatctcgccaacgccggtatccaggctggaggtggcctgctggatgcgggtgacgatgcggcccagctgcgcgacggtggcattggcatcgtcgcgcatgcgcgcgaacacgccctgcaggtccccctccatgcgcacgctgaggtcgccgcgggccagcgcagccagcagtgcctgcaggtcaccaaggttggtttcaaaggtggccagcaggcgattgatgctggtcgacaaggtgcgcacgaagccctgcttgccctccagcacgatacggccatgcaggtcgccgcgtgctgcagcatcgaccagggcagcgacctcggtttccagcagcgtctccagcgcacgactgcgccactccaccgctacgccgaggaactgcccttcgtcgatgatggggttggcaatcagctggtagcgcacgccggcatggccgatctcccgctcctcgcgctggcgcgcggcggccaggctggccagcgccggatgcaggcccacggcatcgctgcccaccagatcttcggcctcgcgctcgagttgctgcagcagtgccggattgacgtaggccacctggccctcggcatcgatcaccatcagcccggtctgcgcactgtccaatgcctgccgcacacgggtgttgccgcgcgccacggcacgctcggcctcgatgcgcgcgcgcaggcgctgctgcatgtcgaccaggcgctgcgccagctggccgatttcatcgttggcgttgtagacacgcagggtggtgtcgagtcggtcgtcggcgacgtcgctggcgaagcgcagggtgtcctggatcggctggcgcaccgcacgccgcaccagcaccaggctggtgatcaacacaccggcgaccagcagcagggtcaccgcgaacagcacgctcatggtgcgtgcgccggcctgctggcgcgcctgtgccttggccagcgccgccacctgggcctgctggaaggcggccagcgccggcgccacgccggcggcggtatccagcagcgattgcgcctctacatccagacccacgcgggcggcggtatagcccagcaatgcggcctgataggcctccatgccgttacgaagggcatcctgcgcatcggtcggcaggcccaccagtgcgagatcgaacggcagcttttcttcgctcgcacggtcggcatgggtggagtcgccatcgagcagcagcagtgcctcctggcggcgcatcttctgcagggacaacgccaacgaaggccgctgcaacgcatccacctgcgcctgcagggcgtcggcggcctgctgcaattgcgcggcgaggccggcatcgccacgacccatctcatcgacgcgttcgaacagggcggccacaccctgcgagaacgcgccggcggcttcggtcagtgcctgcagcgcctcgcgccggccgggatccatcggcatcgcgcgcagcgcctgaagatcggcctggagcgccttctgcgtcgccagcagctgcgcgcggtcggcatcgtcgaaactacgtgcatactgggtctgcagacgacgcgcctcggccacctgcgtggccacgctcgcggccagatcgctgccgtgctggtagctggcctggctgcgcgccgcctgcgtgctggcatggccggtccaggcgtagacggcggcgatcgcgatcaggcccagcccacagacccacagggtcgccttgagcttgctggccacactgagccgatgcggctgcagccacagcagcaggccgggggacgccgagcgcagtgcggcaagccgcatgcgcagggaccggaggtgggggacgacggccgacatgacaggctccaggcggaaggacgcacctgtatcggcgggaaatggcgcaactttagggcgctcctggttcactcccaccgattgctggcggacgcggcctttgtacccggcacaggcgacggggggatgacacccgcgcaatgcttgacctcaaccccggctgggagagcacagtagatctccctcccccgcccggcgcgcgcatgacgacgctcgatgtcccccgctacctgcaacgcctgcagctggatgcaccgccaccgctgacgctggcgggcctgaccctgctgcaacagcgccacaacgcactgctgccgttcgaaaccctcagctgcctgctgcgcgatgcagtaccgatcgacctggacagcgtgcagcgcaagctgctcgacgaccgtcgtggcggctactgcttcgaactcaacggcggcctgctggcactgctgcaggcgctgggcttcgatgcacagccgttgagcgcgcgcgtgctgctggccgcccaggacggcgaactgaccgcacgcacccacctgctgctgcgtgtgcaggtggacggcgatgactggctggtggatgccggtttcggcagcctgaccccgaccgtgccgctgcggctgcatgatccgcagccgcaggccacgccccacgagcgcttcctgttgcagcgcctgcccggcgagggggatttcgtgctgtccgccgagtccggcgatggctggcgggcgatgtatcgcttcgacctgcacgcgccggcaccgatcgacaacgtcgtgggcaactggtacgtgtgcacccatcccgattccagtttccccggccagctgcgcgcatccctgaccgggccgcactggcgacgcaccatcggcagtggcaactacaccgagtaccgtcccggccaggcaccggacaagcgtccgctgcgcgatgtgggcgacgtgcgcgaggtgttgcagcagcgcttcggcatgcagctgccggacgacccacggctggacccggcgatcaacgactggctgcagcgctcacgctcggccacggtgtagagccgggccgatgctcggatgagcgttggcggctgggtcaacagcagccgagcatgggctcggccctacagaaccacgcgcgcctgcagcgcaatgcgattgccttcgctgtcggcgatctcggccacgcgccagtcaccggcatcggccgggccgaagcgcagctcggccccggcctgcagcgcacgctcgaggctggcatccaggtcatcaaccccgatgtagatgcgcgcaccgtggacggagggcagatagtcggccccccgcaccagcgccatgctggcaccggtggcctcatcggcaaacggcaggtaggccatcctgcagtcgtgcagcaggatcggttcgtccaccgccacctgcagccagtgctggtagaacgtgatggcccggcccaggtcagtgaccggtatctcgacgtgcaggatggggttcatgtccgcaggataaccggatgctgacactgccttgcaggtccgtactggcatgctggaccgccctttccccgcggagtcctgcatgtccctggccgatcatcgtggtgcgctggcaccgctgggcttcctgcgcgtggccatcaacctgggcaatccagtactggcgcagggggacgcgcgctcaccgcgcgggccgtcactggaactggccacggcattggcgcagcgcatgggcgtgcaggcacgcttcacctgccacgacgccgcggccgcggtggtcgctgcagccagcaaggatgcctgggacctggccttcctggccatcgatccggcgcgcgccgaccgcatcgccttcagcgccccctatgtggagatcgaaggcacctacctggtgcgcgaggacagccctgcgcagcaggtggccgacctggaccgcgatggtctgcgcatcgcggtcggtcgtggcgccgcctacgacctgttcctcagccgcgaactgcgccacgccatgatcgagcgggccgagacgtcggccgctgccatcaccctgttcgatctgcagcgcctggatgccgccgccggcgtgcgccagccgctggccgcctgggcgcaggcgcatcccggccaccgcgtgctggccgaccgtttcaccgtgatccagcaggcggtcgcggcgccggcctcgcgcccggccgatgcattgcaggcgctgttcgaggaagtggaggcgatcaaggcaggctcgttgctgggcgaagccttcgcccgtgccgggcaggcggttacgttggtacggtgaccgcgggacacacgcagtcgagcatggctcgacgctataaatgcgcgtctgccatgtgccggacgtgctcggccgcctgagcgtgcagccagtcgcggaaggccaggaagccgcgatggcgggccgagcgctgcgggtagaccagccaatgcggccaggcggttttcagtcgcaggctggacagcgccaccagttggccggaatccagcagcaggcgcgcccgcgtcacccgtcccagcgctacgcccaccccgtccagcgccgcacggtgatgcgcctccgaatcatccagcaccgccacgaagcgcggcggcgggttctgcccactcagcgcgaaccaggcgccccacgcgccatcgggatcccccagcagcggccactggttcagcggcacgcggtcgatccctcccatgcgttcgatcagcgccgggctggccatcggcagcagccactcgtcgaacagcggctccaccaccaggcccggccactgcccgctgcccagccgcagcgcggcgtcgaactggcgctgtcgctcgaagtcaatcaggcgttcactcgactgcaggttgatctcgatctgtggatgctcggcaacgaagtgccccaagcgcggcaccagccacgccgacgccatcgacggtaccgcgctgatcgtcagcacgtgctcggcgcgtgcggcatagggctggaaggcctcgttgatcgcatccagatgcgggcctacctggtcgagcaggcgctgcccttccagggtgagggtgacgccgcgtggctggcggaccagcagcggctgccccagccgctcttccagctggcgcatctgatggctgagcgcactgacggtcaggttcatcgacgccgctgcgcgtgacaggttgcccagccgcgcggcggccacgaaaccctgcagggcgtgaaggggcggacgggacatcaggcttgaattcctctcaaggcatgcttgcggaaatgtcgctttttcccggtcaatgctgcccgtatcgtgcaatccactcaagtggagggacgctcatgaacatctacggcagcctgttgttcctgcagggccacgtggccaacgccgaactggcccggcagctggcctgcccgtccaccggctcccccacgggtgcgccgcaaccggccgcgccggttcagcaaccgcgtggccgttgaacacggctcaacctgcataccaacgctggacgtgttcaggcagccatggcattgggtcgatatccagcacccggcaaccgtcgagggtgtcacgcagcacgcgctcgccggggccaccgggcatgcgcaggccatcctcttccggaagctgcaccgccgcccagtcgtgcagccggtccatgcgcaggcgctgggcggcctgcagccaagccttgagctggaaacagcgatagccctgtgcgcccaacgcatcaaccgcgagcgacaacgcctggttggcaccacgcacccattcggtgcgacctccggccttgtcctgaaccgtcatcggcgccggcgcgcggtgcgccttgaacggcgaacgcagctgcagctccagatcacgcgcatcgcgctcgctctccgcttccaccagcgtaccggcatcaaggtcgaagaactcgaaccagcgccggtgcaatgcgctgatgcgcccgagcggatcgcgtgaaaagccgatcttcgcgtagtcctcccacgcacaggggaagacgtaggcgaagacacgaccgtcgatgcggatatgcgactgcatgtgcgcaggctgcctccactgcagcccgggcgcaaccgggcgttgccgtgggcgccgcagggctttggcagtacggcttcatgcagccgcttcggactatccttgctggctgtcgctgtcatcaccgccaccatgcctgctcctgcgcctgcccacctgccggtctcgtccatcaccctagacgcggcaaccttcgcggtggtccaccagcacaacgcggacatcgcgcggcaaccggcctcgctgaccaagctgatgaccgcctacgccgcttacggatgcgtcgaagagaacggtggcacgtgggaccaggcggtcaccatcgccgccgaggatgtgcttgccgtagccgatgatgaaacacgcatgggcctggtgcccggcgaaacggtcacgctggcgcgcctgctggaagggttgatgatcgtctccggcaatgatgcggcgctggccatcgcacgccatctggacggatcacagcctgcgttcctgggccgcatgaactggcacgcgcgccagcttggcctgcgcagcacgcggttcgccagcgtgtccggcatcaccaccccgcaccatgcctccagcgcgcgcgacatggcggtactcgccgcctgcctgctgaatgaccatccgcagatcctggcaatcaccgcgcagcgcacgttcgcgcatggccgcttcagccgcagcaaccagaacgcactgcttggcgaagacggcgtggacggattgaagaccggttacacccaggccgcaggcttctgcctggccgccactgcctgccgggctgtgcccgggcggaacctgccggtacgcctgatcaccgtggtgctgggcgctgaaagccgcgacgcacgcgatgcccttgtgcgcgagcggctggccgccgggtttgcggcgctggccgacaccaccgccgacgcctgagcggatcagcgtcgcttgaccgtcgccacgatcaagcgctgcagctcggcctcggcgccgaccttgtccagcgcgcctgccgccacggcttcggacagggcttcggccgcaccgagaatcgcccagcgtccggccagggggaccgtgccatcggccgcaaacgggcccagccaggtgtcgcagttgtcgatgaagtcctgctggtagcgccgacgcacttcatggagttccggcgcgcccaccagcgcagcgaggatgccctgcacttcactgccctggctgaggacgcagtcgatgtagccggaggcgatagccgccgcacgatcggccagctgcgccctggcacggccgatacgctcgtggaagaccaccgtctgccgcccgtcatagtcatcgtagagcgcggccagcagcccgttgcgggtcacgaagtgatcataggccaccggtttggtcacaccggccgcctcggccagccgccccagcgtcaatgcgtcggtgccttcttcaccgatcagcgcccaggccacgtccagcaactggcgggcgcgttgctcgcgggtcaatcggcggcgcgtgggagcggcgttggcaggcatcggtggagcacggcggtcagcgcatcggagcaccgattttacggccgatcgccagcgcggtctgcagatgcgcttcggctgcaccggaatcggcgtccagcagcaggtcggacgacagcacgcgcgcgccgcagtagtcgaagatgcccatgtcgatctgggtcttcatcgccgcaccgtagccgcgccgttcgatcatgtccgcgccagccccgccgatgccgaccagatgcacgcccaaccgctgcagctttttctgcaccttgccatcggcgccgtcctggtaggcccagccctgggtgaacacacgatcgatccagcccttcagcagcgcggggaaggaccaccagtacaggggatagaccagtaccagcgtgtcggcagcctgcagccgcgcctgctcggcggcgacgtcagccggagttgcgccgatgccacggaacagcgcctggtcctgcatgttgaagcgcggatcgaagccttcggccatcagatcggcgtgggtcacgctgttggcggcatccgacgcggtgatggcttcgccgatgcgcctggcgatggcatgggtcaacgcgccgggttcagggtgggcggtaacgatgagggtgtgcatggggcatgtccggagttcactaactaccaatagtaagtagtgtcgcccgggataccagcgccatgcgtgggacgctgtttccgcatccaccgtatagtgcggcggttcccactgagctgcccgacgatgcaccggtatctgcttgcccttctgctggccctgccgatggcaatggacgttacgcccgcgctggccggtgaactcagtccggaagactcggccgcattgcgcaaggaggtgcaggcgatgatgggcgccttcgcccgtggcgataccgagctgatcatcgcgcgtacccatcccagcctgaagcagctggccggtggcgacgaggcctatgcgcgggcgacccgcgacaccgtgaaggcgctgcgcagggccggcgtcagcatcatcagcgacgaggcaggcgtgccgggccgcacctatgcggccggtgacgaggaagtctgcttcgtaccgcgccagtcactgctgcgcgtgcgcgaagcgccgatgcgcagcacgtcattcatggttgccgtgcgacgcgtcggtacaacgcaatggcgctatctggacggcgcggcgatgctggacaacccggcactgctgcggcaactgctgccggcgctggagccgggcgtgacgctgcccaggggcgggatggaagcgctgtagtcgcaggcgcgcgtccatccacgcccggggtggtccattgcaggcctgggcatgtgtcagcggaacagcgcgttcaacgccgcgcccgaagccgcctgctgcaggccatcgaagcgaccgtcctgcatgatcggctcgatggcctgcatcagcccaccccacgcagctcgcgccagcgcaccgcccaggctgacccgtcgcacgccgagtgcggcgatgtcctgcaggctcagcggtgtcggtccacccaccagcaggttcaccggcttcgcccctgcagcggcaaccaccgcgctgatctgttcgggcgtgctgatgcccggtgcatacagcacatcggcgccggcctcggcataggcgcgcaggcgctgcagggtgtcctgcagatccggcacgccaacgaagaaattctcggcccgcgcgaccagcagcacatcgccccccgcgcggtcgatggccgcacgtgccgcacacagtcgctcgaccgcctgcccgatcggccgcagcggcgcatcggccacgccgctggcgtcctcgatcgacagcgccgcgataccggtgtcgatggccgccgccaccgcctcgcccactgcctgtggcgtggcgccgaagccatcaccgaaatcggcgttcaacggcagcggtgtcgcggccgccatcagccgcagatgttccagtgtggcctgcagcgaaaccgccccatccggccgcctttcactccaggcgcagccggcactggtcgtggccagtgcctggaagccctgccgctgcaggtagcgggcgctgcccacgtcccacggattgggcagcacgaaacaaccgcgcgcatgcagctggcggaaacgcgcgcgcttgcgctgggtgtcggcatcaagcggggtcatggcgggttcccgggcggcggacctgcaccctagcccacgctgcggcggcactcaatcacggcgtgggccagcgtgcatgaggtgatgccggctgcttattggacaccaccgtgcacgctgcccgagcgtgcttgcctgccacacagtgccccacggagccccagatgcacccggacccgcagaccctgatcgacgccggcgacgatgacgcccattgggccgacctgctttcacccgcgcgccgtcgcctgatcgcgtcggccgggctggccgctggcggcttggccagcgcgtcggctgccaccgcagccgcgcgcagcgacaacgccgtgaacaccaccgaacccgggcgacccggcttccgcgccatcgttccgccggcgcccgagggccgcagcccttggggccaggccacggccagcgagcctaccccgcggccggccagcgtgcgccccggcgaggccacgctgcccacccggccacgtgcctacaccgccatcaagagctaccacgcccacatctacttcgacgaggacagcttcgagaaggccgcgctgctgcggcgctgggccgccgagcgcttccctgtggagctgggcaactggaaccttgagccacgcgggccgcacgtcaccccgtcgttctatttcggcttcaccaacgacctgctgccggtgctggtgccctggctgcagctcaacagcctgggcctgaccatcctgatccaccccaataccggcgatggccgcgctgaccatctgcattacgcgttgtgggtgaaccgcgcgcagccggtcaatgcctacaactggccggcgccgaagcccgggcagccggaaccgctggaagaggtgttcccgaacgtggtgccgacggtgccgctggagatctgagcggccgggtgccggacagctccatgtggaggcgcagtgtgctgcccaccgaaccccgtcctccccgcgtggcgtggatgccggcatcgtcggcctacgtgcacgcatccccgtccagcaccacgttcagcgcgccttgatccagcgcccgccatacggccgcaagcgctccggcagatttcaaacatacaattgaaacgctgcaaacttcgccgaactggacagcatccgccggttccgccagactgccgccctttcccgtcttccggatcccatggcgaagctgctggtcctgcacggccccaacctcaacctgctcggcacccgcgagccggaggtctacggccacaccacgctggccgacatcgaccaggccctggctgcccaggcatcggccgccggacacaccgtggaacgcctgcagtccaacgccgagcatgtgctggtggaccgcgtgcaggctgcgcacagcgacggaaccgctttcatcctgatcaaccccgccgccttcacccacacctcggtcgccctgcgcgatgcgctggcggcggtggcggtgccgttcatcgagatccacctgtccaacccgcatacccgcgagccgttccgccagcacagctacttcagtgacaaggcagtgggcgtggtatgcggtttcggtgccgacagctaccgctacgcgatggacgcggcgctgctgcgcgtgcaggcggccagcgcgtgaagatgtcgccgcgtgtgcttgccggcatcctgctgtgggccggtctgtgcggcgccagtgtcgctgccgagcgcgcggccgcgggcatcgactgcgcacaggcaagcggcggctacgagcgcgacatgtgcgattccgatcgcctggatgatgccgacagcgcattgaacgccgtctacgcgcaggcgcgtggcgaactgaaggcgcaggcaaccgatggcagctgcagccgctgcgcggcggccgaacaacagctggtgaaggcccagcgcatctggatcaccttgcgcgatgcagattgcgaggcggtgtatgccttcaatgcagacggcacctcgcgcaaccccgcgaagatgcaatgcctgatcacccagacgcgcgaccgtacgcggcagctgcgcgagttctacgaactgctttgaaccgagtgcaaccgcactctccaccacactgacatcacgagcaaagaggccaccatggatctccgcaaaatcaagaagctgatcgacctgctggaagagtcgaacctggctgaaatcgaaatcaaggaaggcgaagagtcggtgcgcctgtcgcgcgccccggtggccggctatgccgccccggtcgccgcgccggtgtatgccgctccggccgccccggcgccgcaggcgatgccgatgcagtcgccgaccgaagcctccaccggcggcagcgccaagccgggcccggcactgccggaaggccacgtgctgcgctcgccgatggtcggcaccttctacgcctcgtccgccccggacaagccggccttcgtcaccgtgggccagcaggtcaaggaaggcgaaaccctggccatcatcgaagcgatgaagatgttcaacccgatcgaagccgacacctccggcaccatcgttgccatcctcggcgagaacggccagccggtggaattcgaccagccgctgttcgtgatcggctgaggggcgcgccatgctcgacaaagtcgtcatcgccaaccgaggggagatcgcgctgcgcatcctgcgcgcgtgccataccctcggcatccgcacggtggccgtgcactccacggtcgaccgcaacctcaagcacgtggccatggccgacgagtcggtctgcatcggtccggcgccgtcgccgcagagctacctcaacatcccggccctgatcgcggcggcggaagtcaccgatgcccaggccatccacccgggctacggcttcctgtcggagaacgccgacttcgccgaacgcgtggaagagtccggcttcatcttcatcggccccaaggccgacaccatccgcatgatgggtgacaaggtcgaagccatccgcgcgatgaaggccgcgggcgtaccgtgcgtgcccggctcgggcggcccgctcggcgaggacatcgtcgccaacaccaagatcgcccgcgagatcggttatccggtcatcatcaaggcggccggcggtggcggtggtcgcggcatgcgcgtggtgcacgccgaagcgtcgctgaagacctcgatcgaaaccaccaagagcgaggccaaggccgcgttcggcaatggcgaggtctacatggagaagttcctggagaatccgcgccacgtggaaatccaggtgctggccgatggacagggcaatgccatccacctcggtgagcgcgactgctcgatgcagcgccgccaccagaaggtggtggaagaggcaccggcgccgggcatcaccgccgagcagcgcgagcagatcggcaaggtctgcgtggaagcctgcatccgcatcggctaccgcggcgcgggcacgttcgagttcctgtacgaggacggccgcttctacttcatcgaaatgaacacccgcatccaggtggagcatccggtcaccgaaatggtcaccggcatcgacctggtggccgagcagctgaagatcgccgccggccagaagctgtcgatcaagcagagcgacgtggtgctgaccggccatgccatcgagtgccgcatcaacgccgaagacgccgaaaccttcgtgccgagcccgggcaccatcaccggcttccatccgccgggtggccccggcgtgcgcgtggacacccacatctacagtggctaccgcgtgccgtcgaactacgactcgatgatcggcaagctgatcgtgcacggcccggaccgcgaaaccgccattgcccgcatgcgggtggcactgagcgaaatggtggtcgatggcatcaagaccaacatcgccctgcagcagaggatcatgcgtgacaagggcttccaggccggtggccagaacatccactacctggaaaagcgcctggccgagcgcaagaacaagccgatcgcattgacctgatcggcgccaggtgctggacatgaaaagggcggggatatccccgcccttttctgttcctgtagagccgggcccatgctcggcttgccgccaagcacagccgagcatgggctcggctccacagcgagcacgtcagcgcttgtcggccacgtcggccggaatctgcgaatgggccagcggccgcacgccattgggcgaggtcggatcgacgatcaccatggtttcggtcgaaccatcgggccacaccacctggaaggtgctgccggccggcagtgaagcgaatggcatgccactctgcgcgcggtagaccgcagcgacctggctggcaccggcgcggcgcacgtcttcctgcgccttcaccgtggtcagctccaccttcgacagatgccggtagcggtcctcgtaggtatcgatcatcagcaggccaaccgccccagccgagtaggccacgaacagcgccacccagaaccagaacttggccccatgcaggaatcgacggtaattcatcgcccgtccctctttccaaccaatcgcttgatccattccttcattttcccagcaccttgccgcgataccgcagcgtcatacacgaaatcccggaaatcctgcgctccatcctgcgaacagatccctccgttcgcacaaaaattgttgaccagcacgctgtccgctccacaggccaggccgagttcacaggccgcaagccgccatgcaagttcactgagctgctcgcccgccaccagcccgtcaagcgcgcggtcaccggccgcacgcacgcccatgcctggcgcgatggccatgtaggcctcggggtcgcgcgaggtgcgcacgcgctcgaccaggtcgcggcggtactcggcactgtcatgcaagggctcgccctcggcgaacagcgacgcttccgcggccaggttgccctgcgcggccgccttgcggcgttcggccagcaccagcgccgcgcccagcttgtcgcccggcacgaaaccgccacaccgctgtgccacgcgctcgcgtgcctcgatcatcgccggcgccgcagtcaggcccaacccgctcagtacgttgttgtccaggcggtagccacccggatccagtgcgtactgcgcgcaatagtcatagacgcggctgagcatccagcgcgcctcgtgattgccgttgtcggcctgtgcgcgcaggcgctgggcgtaggcatacaggtcgctggcgtcttcgatgtcggcgcgcaggtccagcggcaggcccgacggcagcgtgttgccgcgctcgaaagccgccagccgccgcgccagggcttccggcaccaccggcagcggcgctccgccgtcacggctggccatggccagcggcaggtccggcgacgccgacgtcgacgccacgcccgcagcatggccgctggcccgatacccggccacgcccagcacggccaccgccggcagcacgagcaaccaggttttcagggtcggagcgaaggccatcggcggtggtgagcgttcacggcacacaggaaagcgccgagtttagcaaggcccggcaggcctgtctgaactgcccccattcatctcagagcggcatctcaggcaatacggagacgccccgatggtctagcattgccccctttcccgcgactgtccccaccgccatgccgttcctggaactgaccctgcgctgcaccgaagccacccagccccgctatgaaaatgcgctggaggacgtcggcgcactggccgtgaccctgcttgatgccgaagccgacaccagcaacgaacaggccatcctcgaacccggcgtgggtgaaacgccgctgtgggacaccctggtgctgagcgcgctgttccccgccgacagcaatgcgctgctgctgctggccgccctggaatccttcgacccggaactggactggagcaatggcagcttccgcgcggtcgaagacgaagactgggagcgcgcatggctggaccagttccagccgatggatttcggcagccgcacctggatcgtgccgtggaaccatgaactgccggacgctgcacaggccgccgatgccgccgtggtgcggctggacccgggcctggccttcggctcgggcacccatccgaccaccgccctgtgcctgcgctggctggaccagctggccgtggacggccagctgcagggccagcgcgtgctcgacttcggctgcggctcgggcatcctcgcgctggccgcgctgaagctgggcgccgcagaagcgatcggcgtggacaacgacccgcaggcgctggtcgccaccgccgacaatgccgagcgcaatggcgagcaggcccgcatgcaggtgtacctgccgcaggacgaaccggtcgccacctacccgatcgtggtcgccaacatccttgcctcggcgctggatgcgctggccgagctgctggccgcacgcgtcgccgccggcggtcgcatcgccctgtcgggcatcctgcagggccaggaaggcgaactgctgcagcgttatgccgcgtggttcgacgatctgcaggccacccaggatggcgactggatgcgcatcaccggcacgcgccgcgcctgatcgtgattgaatgaccgctggatccgagcccgcgccctgagcatgtccgagccgaacccgccgcgccgccctttggccaccttcctgcgccccgcgtcggaaggcgaggccgcacctgcgaccgacgcgcgcacgcccgacccgtcggcgcatgacatccctgccgcgaagtccggggacccgggcgacgtggcgctgccgccgatggcggagacgcgacagctcgatgacaccgtcatcctcgacgaagcgaccgtgatcgaacccgtccttgccgtcccggccgcgcaggcggtggccggcgatgcgccgagcttcctgggcacttcgcggccgcgcgcgctgccgacgccgcgctggcactgggtgctggtcgccgggctggcactgatgctggtactgcagagcgtgctggccgatcgtgcgcgactggccgccgaggccggcaaccgcacctggctgggcgcactgtgcggcgtgctgcgctgcagcctgccggcctggcacgagccgaccgcgttcaccatgaccagccgcgagatccgccccctgcccggccaggccggtgtgctgcaggtgcaggccagcatccgcaacgatgcgcgctgggcacaggcctggccggacctgcgcctgtcactgtccgatgccgatggccgggtgatcggcagcggcgtgttcacgcccgcgcaataccttggcgaaagcccggccacgaccgtgctggaaccgggccagagtgcgcgcatcgcgttccgcgtgcaggaacccgccgcgtccaccgtcgcattcaccttcgacttcctctgaccagggtagaggcgaccagccgtggcaggtcgggcacgctcgcgctagactggccgccaccacctcgtccggccgcgcgctccgcgcgcacgggccaaccgaatcgggaacccccttgaacgctgtcctctctcgtcctgacaacagtcgtggcgctccccggccaccgctgcgtgaacacgtcgcccagtccgtgcgccgctacctgcgtgaccttgatggctgcgacgcggacgatgtctacgagatcgtgctgcgcgagatggaaatcccgctgttcgtggaagtgctcaaccactgcgaaggcaaccagagccgcgccgccgcgatgctgggcatccaccgtgccaccctgcgcaagaagctgaaggaatacggcatcagcgcctgagcgcgcgcgggtagtgccggccgctcgccggcaaccccatgaacgatggcaggatgtcgcagttgccggccagcggccggcactaccggtagatccacgccatgcgtggatgcagccccggcgggatcacccgccgccgcccgccttccagtagtaccgcaccacatggaagaacaccggcgcggcgaagcacaccgaatcgagccggtcgagcatgccgccatggccctcgatcatgtggccccagtccttgatcccacggtcgcgcttgatcgccgacatcaccaggccgccccagaatcccatcaggttgatcagcagcgacaggccgaacgcctgcagcggcgtgaacggggtgatccaccacagcgccgccccaagcgcgctggcgctcagcacgccacccacgaagccctccaccgtcttcgacggcgacagcttcggcgcgatcaggtgccggcccagcagcttgccccagatgtactgcaacacgtccgaggattgcaccacgatcaccaggaaggcgaacagcagcacgttgcgcgaggggtcgtgaccgggcacgtgcaggttcagcagcagcggcacgtgcgagatgcagaacacgcagatcatcaacccccactgcaccttcgcggtgcgctccaggtagtgcgtggtatcgccaccgatggtcgacaggatcggcaggaacaggaacgcatagaccgggatcagcagcgtgtacatgccgtaccagtcgatccacaccaggtagtactgccacggcagcacgatgtagaacgcagccagcagcgcgtagtagtcgcctgaacgggtcggcgccagggtgatgaactcgcgcagcgcgaacaacgaaatgatcgcgaacagcacgatcaccccggcgcggccgaagaacagcgccagcccgaccacgatcgccatcacccaccatgcacggatacgcgacaccaggttggcgatcaccgcgctgggctgaccgcgctggcgccagcgcagggtctcggccaccagcgtggccagcaccagcaccgcgccgacgccggcaaacagcaggccggtctgctggccgacactctgcgttgccagatcgccagatacatccagcacgaaactcatgcacgacctccattcggcgccaggtccagcagcgcctgccggctgcgggccaggaatgcggccttgtcctcgtcggcctgcagccgcagcggcgtgccgaaggtggccgtgcacagcagcggcaacggcaggaaccgccccttcggcatcacccgcttcaggttgtcgatccataccggcacgaactccagctccggccgttgccgcgccaggtggtagatgccgctcttgaacggcaacagcggttcatcgccgatattgcgcgtgccttccgggaacaggatcagcgagcagtcttcgtccaccgcatcgcgcagtacctgcaacgggtcctgctggcgatggccggcctcgcgctcgaccagaacaccgttgaacaccgcatcgatcaggtagcgacgcaggccatcacgctgccagtactcggccgcggccaccgggcgcacctggcgccgcagtgccggtggcatcgatgaccagatcagcacgaagtcaccatggctggcgtggttgccgtagtacacgcggcgctcgctggacggcgcgcaaccgatccacagcgcgcgtgcgccggtcaccacatggatcgcgccactgcaggcgcgggcaatcagttcggcaaacatcggtcactcccattcacgtctgcggccacaccacggccagcaccagcagtgcgaactgcactgcggtcagcaggtactggcgcagcagcaggcggcgcatgccggaccagcgcgcatcccagccacgcagtggcgcatcgggcgacgcgcggcgcaggccactgtcgtgcagcagctgatcgatgcggcgtgcggcggcttcgccctccagtccttcatcgcgcagcagctgcagcaggctggcatccagccccacccgccacgcgtggtaggcctgtgcgatgcccgcggcaacactgagcagcaacaggccggcagcgatcatcgccagccccggctcggtgccgagcagcagcagtgccaccagcaacatgcccagcgacagcagcgccggccaacgcccctggcgcagcagcaggtgcatggtcaccagatcgggaaccgtgctcatgcgcgcgctcctgccgcagcagtgatggcatgcagatgcgccgcgtgcagcacgatgccggggcgtgcagcccgcacgatcgccactgccgcgttcgcatcggcggcacgaccactgcgcagcagccaggtggcgacgctggcggcgctgcgcgaatagcccagcgcgcagcacgccagcagcggcccctgcacgcgcagacgctcgatggcatcggccgcctcgcgcagctgttccggcgtgggcaccaccaggtccagcatcggcacgctggcatacgccgcgcccggcgcgcggcaggacagttcagcacaggtatcgaccacgccgaccagcggtgttggcaacgcagcacagggaatgcgtcccagccacacgtcatccatcaccggcaccggatgcggcgcacgccgcgtccacagccgcgaattgacccaggctgcgcccaggtacggcgccagcagccagcgtgccgccatggtcaggcgaccatcggcgcgcttctggaacaccgcggtacccagcccggcataggccagcgccaccagcagcagcgacaccaccggccacagcagccacaacgcggcgccacgcagaagcaccaccggcaccagcagcacagcggcccccagcaggtacacccctgccaggcgccagcgcttggcatcacgtgccgtgcgccatgcacgcagcggtggcgtgccctgctccggccacagccacacgcacaaccagccggccagcaggccggtcgggatatcgatgaagtgatgctggaacgtggtcagcaccgagacgccgatcaacagcgcccacgcgtgcagcacccagcgccacacgccgtgcaggtactgtgcgaacttcacccacagcacgatcagcaacacgatgtgcagcgacggtgcctggttgaacggcttgtcgaagcccagcagcacatcgaacagccagccgaacacaccgccgatctgcggacgctcgaagctgaagcgcagcggccacagcaggaagcagctcacggcgatcagctgtgcgctgaacagccgcaatgcgtgccggtccagctccagccgttgccggcacaggaagaacgagaccgcgtagaacaggtcgatcgaccagtacggcacgatcgtccatggcacgaacgggatgcgggtctcccagccgaacgccatcaccggcagggtagcgtggcggccggccatccagttggcgaagccataactggcgaagaagaacggacccagcagggccagccacaacagggcgcgccgccaggggcgcccctctgcggccagtggggatgcggcgagcgtcgccatcacgcggtccggcgcgccagcgatacggtgaagatgccgaagtcgtcgatacgctgcgccaccttttcgaacccggccaggcgcaccagctcgtccatctcctgctgggtacggcggcgcatcacccacgccgcgccaccgcggtggctggtcaaggcacgggcaatgaattccagctgcgggtgccagggctggccggtataggccaggtagccacccactggcaccgctgcggcaatgccctgcagcgagcgcagcacggcgtcgttgtcggggaacagttcgtacaggcccgagactaccgccagcgtcggcgctggatcgaccttggccagctgtgccgggtcgaacgcatcaccctgctcgaagcgcgcgatgtcggccgcgcccaggcgctggatcaacgcctggccctggggcacgttcagatcgctgaagtcgcgcagcacgatgcggtcggcgcgctgctcgccctggcccagtgcttccagcacatagcggccatggccggcggccacgtccagcacccgcaccggcgtgccctgcccgcgcaggcgctgtgcggcgtcgcgcagcagttcctgcaggtgctggccacgcacgcggatgccacgccagccgatcgcatccaggtagttgcggtcgaccatccgccccaatgggcccttgccgcgcgcctcattccggtagatgtagtccagcgtgctaccggaatcgaaaccggtctgcaggcccagcgcgatgccttcggacagcgtgccgccgaagcgcaggccgccacgtaccacgcgccagcgcaggtcggccaggctgttgcgttccggtggccaggccaggatctccgactcttcgaaggtcggcccatggcggtgcgcgtcgcgccgtgacagctcgcgcagcggttcggcgaaacgcgcctggatgaagctgcggatgcgcgccagtgccggtgcccgatcgcgctcgcccagcgtgtcgtggaagaagcccggcaggtgcacccgctccttgatcgggctggacaggcgctcatagaagcgatcctgcgggccacggtgcaccacgaaatccgagccggacaccagcagctgcaccggcacgctgatcgcctgcgcatcggccacgatgcggtcggccgcttcgtacaggcccagcagcacgcgcaccgagatcggccgggtgatcagcggatcggtacggtagctttccacccgcgccgggtcatgggtcagccactgcggcttgacgtagctgttgacgaagaagttgccgcgcagcttctgcatcaaggccaggcccggccgcgcgaacggcacgtacagcttcaccttgaacgccggtgaagccatcaccagcgcacgcaggcgtggcgcgtaatcgtgcacccaggtcgcggcgaccaccgcccctacgctctgcgcgatcaccacgatgtcttccaccgcaatgccgtgctcggcgccgatgtgggcgatgaagctgtccaggtcgcgcaccagcgccgggaagcccggtgcatcgccacgcgcacccggcgaacggccattgccgcgcgcatcccaggcgaagaaggcggtgtcgggcaggtccagctcatcgaccaggtgggtgacgcgcccggagtgctcgtggccgcggtgcagcagcacgatggcctgggtggccggggttgcggtggtgcccgcccagtaccggtagaacagcggtacctggtcgaagctgtggaattcccgttcctgcgcctgacgcatgcaatctcctgattgtctttttgtatctgcttgattaattcgacgaaaccgccgtttcccgcagtccgcgacggacgcggttgatcatggttagcatgcacagcaccgccatggccgcagccacgccagtgaccgtcatcgcgccaacccactcagacgccagcagcagacccagcacgccgacgacgaaggcgcggtcactcttgcccatcgggccgtcatagcggcggctggcaccgaccatcagccccagcaccccggcgtactcgctcagcgccgccgtccaggccagcagccacagcacttccgggcgcacgcccggcacgctgagcaggctcaggtacagcgccgcgtcggcgatcacatcgcacagctcgttcagataggcgcccagccgcgactgctggccgaactcgcgggccaacatgccgtccacggcgttgagcgccatgcgcagcagcatccacagcggcagcagcaggtacagcaggggctgggccggcgcgcagcaccagacggcggcagccaccagcagcgagaccgcggccgcggtcacggtcaccgcattggcggtgatccccatgcggtacagaccgcgtacggccggacgcaacaggtcctgaaaacgtcctttcaatgcatagatcgacacgatccgaacccgctgatccttggcagttccggcacagcctacccgattggagcagcgcgccccatcgaattgcttgcggaccgcccccggccaggctgtgctgaaggcggccacaggccgtgggtgcgggtcgattttccccgccggcgcccgccaccggcccccaccgcctacaatatcggccccgctccgctgccgattctgtcccatgactgctgatctgttgcccgtccgccgggccctcctctccgtttccgacaagaccggcctggtcgagctggccactgcgctggcggcacgcggcgtggagctgttgtccaccggcggcaccgccaaggcgatccgcgatgcgggcctggccgtgaaggacgtggccgaggttaccggcttcccggaaatgatggacggccgggtcaagaccctgcacccgatggtgcacggcggcctgctgggccgttccggcctggatgatgcggtgatggccgagcacggcatcggtgccatcgacctgctggtgctgaacctgtacccgttcgaatcggtcaccgcccaggccgactgcaccctggccgacgcggtcgagaacatcgacatcggcggcccggccatgctgcgctcggctgccaagaacttcgcccgcgtggcggtggccaccgatccgtcgcagtacgccgagctgctggcctcgctggaggccaacaacggccagctgacggcggccacccgcttcgcattctcggtggccgcgttcaaccgcgtcgcccagtacgatgcggcgatcagcaactacctgtcggcggtcaccgccactgacgccgccgtgccggcccgtgccgagtacccggcgcagatgaactccaccttcgtgaaggtgatggacctgcgctatggcgagaacccgcaccagagcggcgcgttctaccgcgacctgtacccggtgccgggcacgctggccaccttccagcagctgcagggcaaggagctgagctacaacaacctggccgacgccgatgcggcgtgggaatgcgtgcgccagttcgatgcgccggcctgcgtcatcgtcaagcacgccaacccgtgcggcgtggccgtcggtgccggcaacggcgatgcctacgagctggcctacgccaccgacccgaccagcgccttcggcggcatcatcgccttcaacaagccgctggatgccgccaccgccaaggtgatcctcgatcgccagttcgtcgaagtgctgatcgccccggactacgagccggccgcgctggagtacgcgcagaagaaggccaacgtgcgcgtactgcgcatcccgcacggcgacggcctgaacaacttcgacagcaagcgcgtcggctcgggcctgctgctgcagtcctcggacaaccgcggcatgacccgcgacgaactgaaggtggtcagcaggctggcgccgaccgacaagcagttcaccgacctgctgtttgcctggaaggtcgccaagttcgtgaagtccaacgcgatcgtctacgccaaggacaaccgcaccatcggtgtcggtgccggccagatgagccgcgtgtactcggcccgcatcgccggcatcaaggccgccgatgcgaacctggtggtcgagggctcggtgatggcctccgacgccttcttcccgttccgcgatggcatcgatgccgctgcagccgccggcatcaaggcggtcatccagccgggcggttcgatgcgcgatgccgaagtgatcgccgccgccgacgaacatgggctggccatggtgttcaccggcgtgcgccacttccgccactgatccgcatcaccaagccgggccctgcccggcttttctcttccgtacccgagaaccctgtcccatgaagatcctcgtcatcggctctggcggccgcgaacacgccctggcatggaagctggcccagtcctcccgtgtcaccgaagtgatcgtggcgcccggcaacgccggtaccgccagcgaagacacgtgccgcaacgtggcagtcaaggtgaccgatatcgacggcctgctggcgttggcccaggccgaaggcgtagcgctgaccgtggtcggcccggaagtaccgctggtggccggcgtggtcgaccgcttccgcgccgccggcctgcgcatcttcgggccaaccgccgccgccgcgcagctggaaggcagcaaggcctacgccaaggacttcctggcgcgccacaacatccccaccgcgtactacgccgtgcacagcgacgtggacgccgcgctggcgtatgtgcgcgagaagggcgcaccgatcgtggtcaaggccgatggcctggccgccggcaagggcgtgatcgtggcgatgagcctgaccgaggccgaggacgcggtgcgtgacatgctgtccggcaacgcgtttggcgatgccggtgcgcgcgtggtcatcgaggaattcctcgacggtgaggaagccagcttcatttcgatggtggacggcgtgcatgcgctgccgatggccacctcgcaggaccacaagcgcgtcggcgacggcgacaccggcccgaataccggcggcatgggcgcctattcgccggccccggtggtgacgccggaggtgcatgcacgggtgatgcgcgaggtggtgaaccccaccgtgcagggcatgatcgccgacggcatcccgttcaccggtttcctctacgccggcctgatgatcgatgccagcggcgcaccgaaggtgatcgaattcaacgtgcgctttggcgacccggaaacccagccagtgatgctgcgcctgcagtcggacctggtcgagctggtggaagcggctatcgatggtcgcctggatgaggtcgaagcgcagtgggacgcgcgcccgtcgctgggcgtggtgctggcggccaggccgtacccggaagcgccgatcaccggtgacgtgatttccggcctggacgacgtgccggccagtgccaaggtgttccatgccggtacggcattggatgcgcagggccacgtggtcagtgcgggcggtcgcgtgctgtgcgtggccgcactgggcgacagcgtgcgcgacgcgcaggccaatgcctatgccggcgtggccaaggtgagctgggccaacgcgttccaccgcaacgacatcggttggcgcgcgatcgcacgcgaggggtgaggcacacccccgcttccatgcatggcgcggattgaataccacagtaaagcaaaggcccggcattgccgggcctttgctttacaggactgcttcgagacccttccgatcaatcaggttcaaaagcttcagcgacggcccgctcggcttcttcccgccctgttcccagctacggactgtcgaaacgctggtgttgagcacacctgcgaacaccggctggctaagttccaacgacgtgcgaagtgcacggatctgggcgctgctgtattcgggcacaggcctcagacaaagcgcctcgtacatgctcatgcgccgcttgtcgatgaagccgctggcgtaaaggcccgccgcgccttcatgcaccgcatcgaggatcgcactctttgcacgtccatgttcaaccgtctttgtcatggcaaatctcctgcagttctccgcagataactgccctgtccaactgttcagggctcattctcaagaactcagacgcatacagctgaagggcgtcccgttccgcactactgatggtcgcgcgcgcgttcttctcgtagcagaagagaaagaaccagtagtgccccaccctagttgcgacaataacgcgggcgctaccgcgctttccgcggcccggcagcgccacccgctttttgagaaggccgccccctatatctgcatcaatcagtccttgacgcatttccaccaccgcgcggcacaaggctctatcggtcagtgaagaacgtcgtgtactgcggttgaagcttcgagtgcggaagacacgtgacatgatcataccgtgccaccgagtggtacggcgtgaaaatcagcgtccagcgcatgctccggtcggcgcagctgccaccctggcgtcaggattgatccatgccatgcgtggatgcgctccagaaacaaaaaggcccggcatctccgccgggcctttcttcaatccaacgccaccccgcttacgcggtgaacagcgccttcatcttcttcagcgcgttcgcttcaacctggcggatgcgctcggccgacacgccgtactcgtcggccagttcctgcagcgtcaccttgctgtccgcgtccagccagcggcggcggatgatgtcgcgcgagcgggcatccagttccgccaggccttcgcgcagcagctgcatctggttatcttcgctgtcctcgcgctcgtaggccatcgacgggtcttcgtcatcggcaaccaggaacgcagccggcgacggcggcgcgtgctcgttgtcctcgtcggtcggcgcatcgaacccgatatcgcgacccgacaggcgcgactccatttccatgacctcgcgctcggacacgttcaggtccttggccaccgcgctcacttccgccgcgttcatccagcccaggcgcgtcttcgacttgcgcaggttgaagaacagcttgcgctgcgccttggtggtggcgaccttcacgatgcgccagttcttcaggatgaactcgtgcatctcggcacggatccagtgcaccgcgaaggagaccaggcgcacgcccatgtcggggtcgaagcgcttgaccgccttcatcaggccgatgttgccttcctggatcaggtcgcccagggcgaggccgtagccgttgtagccgcgggccacgtgcaccacgaagcgcaggtgcgaatgcaccagctcgcgggcagcgtccagatcgttgccgtcgcggaagcgacgggccaggtcctgttcgtcatcgaccgacagcaccgggatctggtgcacggcaccgatgtaggcgtccagcgaaccgagcgcactgggaatcgggagattgtttgccacaagggcagtagaggtgttctggctcataggcacccatcttagcagtccgggatttggactgctaaaggaggaaaaagttccagcatcccattgatgcaacactggtcccaaacagagccctaccgtagcgcgatttgatgacagtggcgagcatgcttttcgggattcacaatcccttggaattcaagcaattacctgccgggaaccggccgattccggtcaagcggagctgaacgggccgttctggaggcccattcaggccagggaacgttgtccggcgttcaggcccggccgccagccggcgctcagagcaccgagcgcggcggcagcgaccagtcgatcggggcctggccgcggcgctgcaggtactcgttggccatcgagaaatgacgacagccgaggaagccccgatgggccgaaagcggcgacggatgcggcgacttcagcacgcgatggcggcgggtgtcgatcaccttgcccttctgctgcgcataggcgccccagagcatgaacaccagcccttcgcgctcgcggttgagcacatccaccacgtggtcggtgaagccttcccagccacgaccctggtgcgcaccggccttgccctcttccaccgtcagtaccgcattgagcagcagcacgccacgctgcgcccacggaatcaggcaaccgtggtccggacgcgggataccgagatcgctctcgatctccttgtagatgttcagcagcgacggcggcaccggcacgcccggcggcaccgagaaactcaggccatgtgcctggccgcgaccgtggtacgggtcctgcccgaggatcaccaccttcacctgctcgaacggcgtggcgtcgaacgcggcgaagatctgcgggccgggcgggaacaccgccgcgccactggccttgcgctggcgcaggaagctggacagctcgcgcatctgcggctgcaacaggtaatcgccgacatgctgcttccagctcggttccagctggatcgtcggggtgtcggctacttcatccatcatcgcaacagaggtccatcgttcaatcgggccagcctcagctggaacagcaccttggtgaccagcagccgttcttcgatcggcttgagcaccaggtcgttggcaccggactgcagcagcccggtctggttgtgcgggttgccatcgccggtcatcaccagcaccggcaggcggcgcttgccgtagccgaaatccacgcgcacgcgctgcaccacgtcgcgaccgctcagttcgcccttcagggtgacgtcggtcagcaccaggtcgatgcggtggcgactgcggcccagcgactcggcggtgagcagggtgaacgcttcttcggcgctgaccacgtgcagcacgttcaactgctggcgttccagcatgcgcttggtggcctcggccaccacgcggctgtcctcgatatagaggatggtggcgccggggatggtctgcggctgcacgtagccgcggatgaaggtcgccagtgcttcatggccgagcgatttgtcgaaatagtcggtgacgtactcggtgaagcggcgctgctccaggtgctgctgggcatcgccggagaccacgatcaccggcacataggcctggccggccgcttcgcgcaccatccgcgccagcgccaggccgtcgccatcgcgcagggtcagcgaggtcgtcaccaggtccaccggcccctgtgccagcgcctgctgtgcgtcctcgatgctgttgcagccgatcacctccacgcccggcaggtcacgctgcaggacgtcggcgatcagcttgcgcaccagcttcgagccatcgaccaccatcacccgcgtcgcgggcccttcaaggtgtttcagcgcttgcggttgcatgccggtctcaggtgtcggtcgggcgggtctggcggaggaagtggccggtgaccagccaggcgcccagccaacccagcagcagcgtgccgagcaggaccaggccgccgtgcagcaggtccaggccgtgcagtacgaacgggctgccgtagctgcgcgaaagttcggccagcggcatgcgcagggcggcacctgcagcgccgatcagggccagcgccaccgcgccggcgcccaggccgtaccacgcgcccaggtacaggaacgggcggcggatgaagccatcgctggcgccgagcagctgcagcacgccgatctcttcgcggcgggcctggatgtccaggcgcaccgtgttgccgaccaccagcgcggcacctgcgccgagcaggaccgacagcacctgcaccagccgcgcaccgaaggcaagccaggcatccaggcgctggcgccacagcgcatcgtgctgcaccagatcggcctcgggcaggctttccagcgcgcgcgccaggcgtgcgtcgtccttgccctggccgggagtgatcaccagcagcgaaggcagcggattgtcgttgagtgcgtcgatcgcctcacccaggccggcatcgcgcagttcctgcaggccctgctcgggcgtgcgcacgttcacttcggccacgtcgtcgcggttgcgcagctggccggccaggcgcagcgcgccgggtgcatcgacgttgcccttcaggaacacgttgatgtcgcgcgactgctgcacgctgccggcgaactgcttgaggttgtccagcgcgatcgacaggcccagcggcagcgccagcgccagcgccatgaccatcaccgtcagcagggtcgcccatggcttgcggcaggcgcggcccaggctgaacaccacgctgtgcacgtggtgctggaaccagacgcccacgcgcgagggggcggcggcttcgctgttttcgttcttcgccatcggttactccgccaggtcctgcggcgagatgtcatccaccagccggccatggtcgaggatcagcacgcgcttgcgcatgcggcgcagcagcggcaggtcgtggctgaccaccagtacgctggtgccgcgcgagggcagctcggcgaacagggccatgatctccgccgccagggtcgggtcgaggttgccggtcggctcatcggccaccagcagcttgggctcgccgacgatggcgcgggcgatgcccacgcgctgctgctcgccggccgacagctgcgagggcagcgccttctcgcgatggcccaggcccatccgctccagcaccgagcgcacgcgcttgctgatgtcgccacggcgggtgccgcgcaggatcagcggcagcgccacgttctcggcgatcgagcggtccatcagcagccggtggtcctggtagaccgcgcccaccgcgcgtcggtggcggggcacgtcgccgccgcgcaccttcagcaggttgcgctcgtcgaacaccaccgcgccgcggctgggccgctcgtcgaggtggatcaacttgagcagggtgctcttgcccgcaccggaatggccggtgacgaacagcatctcgcccggcgcgacctcgaagctgacatcgatcagcgcctcgtggccaccggcgtactgtttgctgacattgtcgaagcgcaggacactcatgccccgattatgcaggagcggcgcgacctcgtggagacggtggcgccgatcggtagtgccggccgctggccggcagccatgtgggttgccggccagcggccggcactaccgttcaaagccacccgaccagcggtcgggggcttcccgctgatcggcagcgccgatcagctgcccgacagcatccggcggatcttgcggccgatgcgggtcaggaacgaatcgccgctgtcggccgccgtgcgcaccggcttggccaccacctgcaccggggtcaccgggctggcgccgttgccggcgttggcctgcacgccctcgccaccctcgaccggacggccgtggcgacgacgacggcgcttgcgcggcttgcgctcgccatccaccggcaccttccggcgcgccctcggcgcggggcgggcgcggcggacgcggagcctgggcgacagcggcttcagcaccttcggccggggcagctgcaacctgctcgccttccacgcgcggcttgcgcgggccacgcgaacggcgctcgccgctgcgctcaccgtcgcgacgctcgccacggccaccgccggagcggcccccactgcgaccaccaccacggcgctcttcttcagcggcgcgggcttcgcgcgcttcacggaagatctggccgacgctctcgttctcctcaccttcctcgccagcagccggggccgggcgttccgggcgcggcagcggcgtcaacagttccttggtgaccggctcggacgggatcttctgctcgatgtaggcctcgatgtccggcaggcccatcgcgtagcgttcgcaggcgaagctgatcgcatcaccctcttcgcccaggcgcgcggtacgaccgatgcggtgcacgtagtcttcggcgtcgaacggcaggtcgtagttgtagacgtacttgatgccgtcgatgtgcaggccacgcgcggccacgtcggtggccaccaggatttccagctggcccttctggaagcggttgagcaggctctcacgcttcttctgcggcacgtcgccggacagcacgccgacgcggtagccggccttttccagcgagcgggcgacgcgctcgacgaacaccttggtattgacgaacaccatggtgcgcgcgccttcactgcgcgacagcaggcccagcagcagcgggatcttctcgtcgtcggccgggaaatagatgcgctggcgcacgcgcgcagcggtgatggtctcggcttcgaccaccagcttctgcggctcgttcatgtgctcgtaggccagctccagcacgcgatggctgagggtggcactgaacagcagggtctggcggatggtgcgttccggcatgcggcgcagcaggaagcggatgtccttgatgaagcccagatcgaacatgcgatcggcttcgtccagcacgcagatctcgcaggcgtgcagcgaaaccaccttgtgctgcttgacgtagtcgatcaggcgacccggggtggcgatgatcacgtccacgccctgctgcagcagctcacgctgcttgtcgtaatccacgccaccgtagaccagcgcgaaacgcaggcccaggtcggaaccgaacttcaccgcatccttgtggatctggatggccagttcgcgggtcggggcaaggatcagcgcacgcggatcctccggcttgcggtcggccagcgccgggcgggtcagcaggcggttcacgacagcgaccaggaaggccagggtcttgccggtgccggtctgggcctggccggcaacatcaccgccgggcagcgcgaccggcagggtcagcgcctggatcggggtgcagcgggtgaatccggctccttcaaggccggcctgcagggccggatgcagctcgaaggaggagaaggtcaaatcggtcagcggtttgtcgctcatgagtccgtcttggtatggccgccggcccgtggggcggctggcacttcatcgtctaggggcaccgtcgcaaactgcggcccctgcggcgggttggcaggctgggaccaccggtccgcgcgccgcacaatgccccagtttaccgcactcgggcaggcaaaccggaatgcggcgtctcatggcatccagagacgctaccttcacccagccacaccggacttgaacggcctgcccgggttcgctggtgtcgcccactgccagccccatgtacaggaagacagtgaaatccgacacataccggccatcgaagcgatcacgatacgctgggttccaaccggcgcctgtccctgccctgcgataggggtacactgccggccgtgagcgtccaggcatcccgccgaacgcaccgcggcggtgcgccgcgaggcaacgacgagggtcgcgccaccgggcatggcccagttcacccacctccggcatggccgggtgcaatccaagacgagaaaccaagatgagcgacaaggttgtacatgtcggcgacgccgacttcgatagcgcagtgctgaattccaaggaaccggtgctggtcgatttctgggccgagtggtgtggcccctgcaagatgatcgccccggcgctggacgaactggccgatgcctaccagggccgcgccaagatcgccaaggtcaacgtcgaccacaaccgcgcactggccgccaagtaccacgtgcgttcgattccgtacctggtcgtgttcaaggacggcgagaaggtcggcgagcagatcggtgcggtgggcaaggcccagctggccggcctgctggacaaggccctggcctgatcctgctgttcccggcagccgctgcccgcggctgccggcgggcgccccgcgtccatcatgaatgctgttcccggcgactcttgcatgccgccgcaggccgatgatagtgtcggcatatccggccgcgctcgcgtgccgcaccctctggacgcagtttcttccagacccattcccaacgttcgccgccccagccgggcgctcgcaccttcaagcgaggaataacgctcttgtccgataacacttccgaaaccggcagcgccgatgcgcccgccgaaaagcgcgtgcgcaagccccgcgtgagcaaggccgccgccccggcagccgcgcccgaagcgccggcaccggctgcagccgcccccgcgccgagcgcgcctgccactgaacgcccccgcctccggcggcggtgagggtggcgaaggccgcgaatccggacagcgccagcagaaccaccagggcggtgggcagcaccagggccagggtcagaacaacaacccctacaaccagaacggccagcagggccagggcaatcgccgcgaccgtttccgcaaccgtcgcgaccgcgaccgcaaccgcggtggccgcgatgacggcatgccgcaggacggcggcgagcagcagcccttcgtgccgcgcccgcacgccaacgtgcccgagggcttcccggtctactcgctgagcgacctcaagcgcatgccggcacagaagctgctggagatcgccgagcagctgcagatctccgaaggcgtggcccgtgcccgcaagcaggacgtgatcttcgccctgctgaaggtgctgacccgccacggcgacggcgttgccgccgatggcgtgctggaaatcctgccggacggcttcggcttcctgcgcgcggccgaagccagctacctggccggcccggacgacacctacatctcgcccagccagatccgccgcttcaacctgcgcaccggcgaccacatctccggccgcatccgcttcccgaaggacggcgagcgctacttcgcgctgaacatcgtcgacaccatcaacggtgagccgatcgaagcgtcgaagaacaaggtgctgttcgagaacctgaccgcgctgttcccgcgccgccgcttcaccctggagcgtggcaacggttcgtcggaagacattaccggccgcatcctcgatctgatggcgccgcagggcaagggccagcgctcgctcatcgtgtcccagccgaaggccggcaagacgatgatgatgcagcaggtcgccactgccatcaccaccaaccatccggacgtgcacctgatcgtgctgctgatcgacgaacgcccggaagaagtgaccgaaatgcagcgcaccgtgcgcggcgaggtcatcagctcgaccttcgacgagccggccgcgcgccacgtgcaggtggccgaaatggtcatcgagcgcgccaagcgcctggtcgagcacaagaaggacgtggtgatcctgctcgactcgatcacccgcctggcccgcgcctacaacaacgtggtgccgagctcgggcaaggtgctgaccggtggcgtggacgccaacgccctgcaccgcccgaagcgcttcttcggtgccgcgcgcaacgtggaggaaggcggcagcctgaccatcatcgccaccgcgctggtcgacaccggctcgaagatggacgaggtgatctacgaagagttcaagggcaccggcaacagcgaagtgcacctgagccgccgtatcgctgaaaagcgcgtgttcccggccatcgacatcaaccgttccggcacccgccgcgaagacctgctgatcgagccggaactgctgcagaagatctggatcctgcgcaagctgctgcatccgatggatgaaatggccgcgatggagttcctgctggacaagatgaagaacaccaagtccaacgacgagttcttcggctcgatgaagcgctgatccacggcattgcatcgaaaggaacctgccgctcgctgcggcaggtttttttttgcctgcagggcgacccacttcactttgccgccgccgacttttggcgataatccgcccgataccctgcccggccctgcgggcgtggccaccgattccgctgtcgccccttccggagaaccggtcgggtccagcctcctgccggatccgtcgacgcatgcgaacgctgtctccccgcctcaacctgggcaagctgatcctcgccctggccctgctcagcgccatcatcgccctggccaataccctgctggccagctaccgcgtgcagcgcgaccagctggtcggcaataccctggaagccaaccgcgtctatgccaccaagctggccgagaccacccagaacttcctgttggccgcgcagcaggagctggcctacgccgccacccgactcggccagagtgacctcgatccggcacaggcgcaggacgaggccagccgcctgcagctgcagaccaacagcttcaattcctcgctggtggtggacgccgacggcctggtgatcgccacctcgccgcagaccctgcagctgcagggcgagatcctgcacagcgtcggcaacaatgccgcattggctgcacgccagccgatgatcagcgacccgtaccagtcgaccacaggcaagctgctggtctcgctgtcgcacccgatcttcgaccgccagggccactatcgcggctacgtcagcggcaccctgtacctgcgccagcgcagcgcgctgcatacgctgctgggcaagcactactaccgcgacggctcctacctgtacgtggtcgaccgccatggccgcctgctgtaccacgccgacggcaagcgggtcggcgactacgtggtcggcaacccggcggtgaaggcggtggtgcgcggtgagcgcggcgcgcagcaggtccgtaacaacctgggcgtatcgatgctggccggttacgcgccggtaccggtcaccggctggggcatcatcgcccagcggccgaccgaggccacattgcagccgttgtcacggttgatgaccgcggtgatctggaacgcgatcccgctcggcctgctgtcactgctgatcacctggtggttcgcccggcgcatctcgatgccgctgtggcagctggcgcgcaacgtgcagggtggcgaggacaccggcagcgcgatcaaccacgtcagcggcatccgcgcgtggtacttcgaggttgcccagctcaagcaggcggtcctgcacagcttcaacgccctgcaggaccgcattggcacactcaaccgcgccaaccgtaccgatccgctgaccggcctgctcaatcgccgcggcctgcagcaggcgctggatgcgctgcaggtgcagggcattccgttcgcgatcctggcgctggacatcgatcgcttcaaatcgatcaacgacagccacggccatgacgtcggtgacgccgccatcgtccatatcgccgaccagatgcgccgctactcgcgcgacagcgacatcctctgccgtgccggtggcgaggaattcctgctgctgctgccgggcatcagtaccgactcggcgcgccaggccggcgagcgcctgcgccagcacatcgccgatcatccgttcgagccggtcggcaccatcaccgtgtcgctgggcgtggcccacttccccagcttccatgtcgatgccgagcaggcgctgcggctggccgacaaggccctgtacatggccaaggaacagggccgcaaccgcgtggtggtctacccgtacgcggactgaaaagcggccggcctggccgaccgctccatcgcaccgggctcagcgctgcgccagcggcgtcagcaggcgcaggccgcgctgggtgccatcgaccatgtacacgccgccggccggcagcagatcacttcccgcctgtccggcgccatccggcgtgcgccagggtgcggcctggcgcgggccggggatgaaggcacgccagcggccgtagcgttccggctggccgttgtcgctgttgttcagggcgaaagtgaccggcacgcgcacggtccatgaatcccgcgtgctgtcctcgccggtggtcggcggcgagaaggtccacttgcgggccgcactgatactggccttggcgaagatgtcgcgcatcctggccatggtccgttccggtgcgaccacggtcatgttcacctgctcggcaatgacatcggccacggtgccgtcgcgtgcgaccttgaccagcagcagtacgtcaccctgcccgccattgcggaaggcctcttcggggtagcgcggcggcggcatgcgcttctgggtgatcgaatcggtagccttcggatcatattcactgaagtcgacgctggtcatgctgatctggtagttgccgtcttcctgctgcttgccacgcaggcgtacgcgcagcggcgcgtggacggccaccggcgtgccatcgcgcaacgtcggttcgaactgccagtcgcggatggcgccttccacgaacgacacgatgccgggtgcgagcatggcacgctggtccaggaccagcgtgctgaccgaaccatcggccgccacgtcgatactgcccgacagcaccatgctcatctcggcagtggcgcgcacggcgcgcgcgttctgggccatggcatcggccggcagcaggggagcaccggcggcgaacgccagggccagcgcaaggaacaggggggaacgcatcattgccggatccatggtgatgaggtgaaccccgagcgtaccgcagtccgagcgggaccggcaggcagtccacgccacgccgttcaggccaggcgatggaccgccgcatagggcggcgtatccggataatcaccgctggcgaagcgcgcctgcaggccctgccaccacgcgggatcaaacaggtgccggtaatgttcgcgcaccgccgccagctcgcccgccggcaggcccatgaacgggccgaagcgctcgggaaacacgtcgcgtggcccgacatggaaccagggttcgtcggccatggcttcctccggcgtgcgcggctgcggccaggcgcggaacacgcagtcgctgaccaggcacagctcgtcatagtcgtagaagactgcccggccatgccgcgatacgccgaagttcttcggcagcatgtcgccggggaagatgttgttgcgcgccatgtcggtgatcgcctgcgcgtagtcgagtaccgccgcacgcaccgcgtcgccgccctgctcgcgcaggtacaggttcaatggacggaagcgacgctgcacgtagcacagtgcgacttccacctggtcgccatcgacgcgcacgctctgcgcgcactgcgcaagcagctcctgcagcaaggccggtgcgaagcggtcgcgcgggaaacgcagatggcggtacggctgcgcatcaagcaggcgaccgacacggtcgaggttgaacaccagcgcatacttctcttccacctgctgccgcgacatcgacttcggccacgcgaagcggtcgcggatcagcttgaacaccagcggatagctgggcagggtgaacaccgccatgaccatgcccggcgtgccttcggcatgcaccagccgctcctgcggatgttcgttgaagtggcggaagaaggtacggtagcgctcggtcttgccctgcttggcgcggcccagcaccgtatagatctcatcaatgggcttgcccggcaacaggctgcgcaggaacaccaccgcatcgcccaccgtggcaaggtcggcctggaaatagctgcgcgacacgccgaacagatgggcaacatcgcgacgccgggtcagcaccgcatctgcacgcaggccctgcccatcgttgaccagggcgatcacgcacggtgagaagcggtgttcgccgaacacgcgacccaccaggtaggcgcggcgctcccggtagaacacggtgtcgagcagctcgatgctgcccaccggcgtatcaccccagtgggccagatcatcctgcaggcgcacagcgatggccgccgcgcagcgcagctggtgcgcatacggaatgtcgaagcggtaatcggccagcacgcgctggagagcctccaccggccgcgtcggcgagaccgcataggtatgccgtgcgaccgggtgggtgatcgcatcggacggctcgacatcgaaggcgatgaactccagcgccgggtccacgccacgggtggagaacaagcgccgcgacagcgtgttgtagaaggtcttgtacagctcggcgtcgatcagcccccgcagcagtgcgctatagcgcgcatgcacctgcagccacagcgcgcgttccccgatcgcttcgccggcgaggcgccgcagcgcatccatctgttcggcgatgcacaggtcgtacaacgcgatgcgctcgactgcatcccggcgcgcgcccacccagtcgcgctgctcgaaacgctgccgcgcacgggcggtgatcgccgcaaagcgggcgtgatactgctcgaagccggcgtgaatggcgccggcgatgcgcgacgccaagtcggcaacggtgtcaggctcggacatgcagggctcacccgggaggacctgcctcaccatacgctggcgtggggtggcttgtgtagggccactgcatgccgcgacaaacgcaacgattcctacagacctgatgcctccctgctgcctaccctttcaggcccaacaacggcacgaggtgacgcatgcagcaaatgacctttattccgcgcgtggaggaaggcaacgtcatcccgcagcgcgcccgcgacggctacatcagcgcgaccgccctgtgccagtccgtcggcaagcgctggtccgactaccgggcactgaaatcgacggaggagttcctgcaggagctcatggcgcagacgaagctgtccgagaatgagctgatccacgtggtatccggtgggaacccggccatgcaaggcacctggatccacccgtacctcgccatccacctcggccagtggctgtcacgcaggttcgcagtgaaggtctcgcagtgggtggtggaatggcagcagggtcgcgccaatgcgttgctgcccgtgcacatcgaccgctacatgcagaaccgtgccaaggtgccgtacacccatttctcgatgctcaacgagctgacgttgaacctgatcgcaccgctggagcaggcgggctatacgctcccgcaggcgctggtgccggacatctccgaaggccgcctgttctgcaaatggctgagggatcatcgcggcgtcgacaccgatgcgctgcccacgtatgaccacgcctatccggacggccgcacggtgcaggccaagctgtatcccaacgagttctacgaggacttccgccgccacttcaacgaagtgtggctgccagatcatgcgcccaggtacttcgccgcacgcgacagcaaggctctctcgttcgtctctgcactgctgcttccagcagcctgaaggcagcgccgaacgtgctcggctgcttcggctggaagcagccgagcatggtccggcgctacggaggcggccgctcagatcgccagttcggcctccacgtcctgcaccttgcgccgggccaatgccaggttggacttggtacggtccagcacgatgtagaagaacaggcccttcttcttcgccaccgggcgcatgatgtggtacgccttgcccagcgagatcaggatgtcctcgatgctgtcgttgaggttcagcgatgcggcggtcttcatcttcgcgcggatcacttcggtattgccggcggcggccacttccatgtccatgccggcaccggcttcgcccagcagcatgccgctttcgtaatcgaccagcgccactgcctgcgcgccgtcgatgcccatcagtgcgttcaacgaatcattcaatccagccacgtcgcaccccttgtcgatgttggtccgagccccttgttcccctgcggccgggctcacgatccgccgagttcggccaggatcgcctggccacattccctgctctgccacagcacctggccgatcacgctgcgctggtcgcaggccgccatcagcagcaacggtgcgcgcccttcggcctggatcgccagcatcagcacctttccgcccgccgcttccagcatcagtgtctgcagatcgcccagcaccagttcgcgcccgaccgccgcagccagcgccagcatcgcgctggtcatcgccgccagccgttcgccgcgcccttcggcgccggcgctgaccagggcaaagccatcgacgctggccagcacgaccgtgcgcacgccttcgacccgctgctgcaggtcctgcagcaggggctgcaggcgctcacgctgaccggcgtcgggcagtaccgccagctgcccgtcagccatgtgcagccaccagtgcgtgcgcttccatttcgctcatcagtacatccatcagcagcagtccctgtcctcggtcacgggcatccacggccagcagcggcagcggctggtcgtcaaggcaggcacggatggcccagtcatccagtgcggcctgcggtgcctggtccaggtgggtgaccgccacgaccagtgccaaggatgatgcgaacggctgcagcacctgcagatagccttccagctcgctggccaggccggcgcggcgcgcatccagcagcagcaccgcgccacgcgcgccctgcagcaggatcggccacaggaaatcgaaacgctgctggccgggtgtgccgtagagacgcaggcgttcgccgttgggcaggtcgatgtctgcatagtccagcgccacggtggtggaggccttgtcggcgccgaggcgatcactgttggccacatccgtgtcgaccaccgcgccagccgcgatgctgcgtaccagcgtcgacttgccgctgcccatgccgccgagcacgaccaccttgtgctcacgcattgcgctcgctcccgcgcaggtgccgccacaggcgggcgagcagtccgttgtcggtgcgggtgccacctgccgccatcatcagcgtcgccggggcggcctgcagctgcgcgtagccacacagataggcggcatggatgaaatcgcgaacggccgccgccggcagttcgagcagcatcgtgcattcctcaaccgtacacgcacgcttgagcagcagcgagcacaggcggaagccatcgtggtcatggcccagtacgcggaagtccggccagcgcagcagcttcaccgaggcgccgcgcaggcgctcgtccagcgcctgccaatggcggctgcgttgcgcccattgccacagcagtggccgcagcggctggcgtggccgctcgccggccagggcctgcaggcgcgccggtgtcagcgcgtccagctgcaggcgctcaaaggcatcggccagccgctccaccagcgccgcagccggctcctgcaacagcacggcctgatcgtgctccagatccatcagcagcagaggctcgcctgcatcacccagcagtgcctggccctgtcgcagcggcagccgctcgcgcagcaggcgggtgatggcgtgcgcgccatctgccaggcggatcggcgcaggtgtctgcatgaccaggggctccggtgccaactgcatgcgacgcaacgcgcgaccgatggcaccgtcatcaagcacgtcctgatgcccgtcgccatcacgcagctggccgccgatgtcctcgatccagcactgcaggcgcggacgttgctgtcgcatgcgctgggcggcgttgcgcagcgccggggtatcgcggatgaccagcagatcacaatcgtccagatcctggctgcggcggacctggccatccggcagcgccgaggccaggcgcagccgttgcagcagggcctgctcgccctggatatcggttcccactaccagcacgcgtgccatccgtgttccccgtgcggccacctccccggtggcctcgcgtcgccaaggctagggcatcgccagcggcggccgtcgtgatcgattgctcagattcaaggcgactgcgaaacggcgccgatccattctgcgaccgccatcgcgggcaagtttcatgccccgttgacggcattccgacgaccgacggatgtcacggttctggacacgggtcgaatggggtcagatcccttttgcttgcaaaaggaatctgaccccagcgccataaaaagaaacccgcgccgaagcgcgggttccggagtcacggccgaacggcagtggatcagccgcgcagctgttccagcgcggcgttgaaggtcgcgctcgggcgcatcgccttgctggccttggccacgtccgggcggtagtagccgccgatgtccacggccttgccctgcactgcgatcagctcttcgacgatcttctgctcgttgtcggtcagcgtcttggccagcggggcgaagcgcgccttcagggcggcgtcctcgtcctgcgcggccagggcctgggcccagtacagcgcgatgtagaagtgactgccacggttgtcgatgccacccagcttgcgcgatggcgacttgtcgttgtccaggaactggccgttggcttcgtccagcgccttggccagcacacgggcagcggcgttgtcgtagcggttgcccaggtgttccagcgacgcggccaaggccaggaactcacccagcgaatcccaacgcaggtagtcctcttcaacgaactgctgcacgtgcttcggggccgaaccaccggcaccggtctcgaacaggccgccaccggccatcagcggcacgatcgacagcatcttggcgctggtgcccagttccatgatcgggaacaggtcggtcaggtagtcacgcagcacgttgccggtcaccgagatggtgtcctcgcccttgcggatgcggtccagcgagaacgcggtggcttccaccggcggcaggatgcggatgtccaggccggtggtgtcgtggtccttcaggtactgctcgaccttggcgatgacctgcgcgtcgtgggcgcgggcggcgtccagccagaacacggccggggtgctgctcaggcgggcgcgctcgacggccagcttgacccagtcctggatcggcgcgtccttggtctggcacatgcgccagatgtcaccggcttccacggcgtgctcgaacaccacgacgccggcatcatcggtgaccttgaccacgccatcggcggcgatctggaaggtcttgtcgtgcgagccgtactcctcggccttctgcgccatcaggccgacgttcggcaccgagcccatggtggccgggtcgaaggcaccgtgcgccttgcagtcgtcgatgacggcctggtacacgccggcgtagcagcggtccggaatgaccgccttggtgtcctgcagcttgccttcggcattccacatcttgcccgagtcgcggatcatcgccggcatcgaggcgtcgacgatcacgtcgctcggcacgtgcaggttggtgatgcccttgtccgaattgaccatggccacgcccgggcgctgcgcgtactcggcggccaggtcggcctcgaccgcggcgcgggtggcttcaggcagcgacggcaggcgcgcagccaggtcaccaatgccgttgttggcatcgaaaccggcctgcttcagcacgtcggcgtgcttggtcagtacgtccttgtagaactcgttcaccgccacgccgaacatgatcgggtcggagaccttcatcatggtcgccttcaggtgcagcgagaacagcacgccctgggccttggcatcggcaatctgctcgccgatgaacgcggccagtgccttgcggctcatgacggcggcatcgacgatctcgcccgccttcactgcggtcttttccttcagcacgacggcgctgccgtccttgccgtggaaggtgatcttcagcgaaccggcgttggccagggtggccgacttctcgctgccgtagaagtcaccggcggccatgtgcgcgacgtgcgacttcgaatccgacgcccaggcgcccatgcggtgcggatgcttgcgcgcgtagttcttcaccgacagcggtgcacggcggtcggagttgccttcgcgcagcaccgggttcaccgcactgcccttgaccttgtcgtagcgcgccttgtagtcgcgctgctggtcgtcggccggggtttccggataatccggcagcggatagccctggtcctgcagttccttgatggccgccttcagctgcggcaccgaggcggagatgttcggcagcttgatgatgttggcgtccggggtggtcgccagctggcccagctcggccaggtcgtcgctgaccttctgcgcgtcgctgagcagttcagggaacagcgacaggatgcggccggacagcgagatgtcacgggtttccaccacgatgcctgcggtggcggtgtaggcgccgacgatcggcagcagcgactgggtggccaggaacggtgcttcgtcggtcagcgtgtagaggatcttggacatgggggacttggactctgtagcagtgctcaggggaaggccggcgccagcgccgggccacgtgcaaccgtgtcgcgcgcggggccgggccccacgctttcccccgtcgccgtcagggtgggcgcgcggcggggaaacccctgcattgtcgcgttttcagccgcgcggggcaaagctgtgccatacgcggcggtactggaccgctgtgtttcgtcgttggctcgcttccggtcaggaagctgaggcttgatggctaattcgacttctcgctggttgaggcacgcatgacccactccgacaatcgctgcccccactcggcacgccttggacagatcaatgtctgcgagcgcttgctttgctggaagttgcagattcggaatcccccaacgacggcggccaggctggcgagttcatcagccgtcgctgcagagcctcggatgtgcagcgaaccggcaccagatgatccgggtcgaacgtagacgtcgtaccgggtggaaggtccttccgcccttgcataccccgacacgacatatccgccatccgtgatgcgcagatccggcgtgcttcctggcacaggcttttcgggggcatctccctcgtagatcaaggcgacttccctaccatcacgcctgatgcggtgcagaccaaagtcaacaggtgcctcgtaggtcacggacatgtctgtcggcacccgcaggcaggcaccgtacagaaagtggtcgcagccgtagctccagagattcgcggggcccattgcgagtgtgagcgcaatccagctgagcatgctgtcccccgacctgtccgtgttccgttcagcgtaccccgctagcctccctaaagcgggcatcgcccaacaaaaaaggacgcagcctcgcggctgcgtccatcgtgagccctgccgggagagagtcggcaggacttacttgacctcgaactcctgcggcgttccggccgccttgccatcgacggtgacctcggcgcggtacttgccggccggccagccctttgcattcttgaacgtgacgttggtggtttccgcaccactggtgttcagggtggcgttctgttcgccggctacctggccgtcctgataggtcagcttggcgccaacggtgacgttgtttgcagcgccgtcggtcttgaccgagacgatgatgtcatccttcggtgcgaacaaagccgtcgtcgcaaccgacttgtcggcggcggcggtcttgccgacggtgaccgacgagacgttgaccgcagcggcttcggccatcggcggcggtgcgccggtcatcggcgcgggagctgcgggttcggccggggcggtcgctgccggagcggcgttgctgtcggtcgactcttccttcttcttgcaaccgaccagggcaacgctgcccagcagggcggcgatcagggcggtctgtagcggggtggtcttgatcattcggggttcctcccagggattgtcggacggcgttcgatggccggcttacttcggcggcagtttcagggtctggcccgggaagatcttgtccgggtcatcaagcacatcgcggttggcttcgaagatctttttccaggcattggcgtcgcccagatgctgcttggcgatcttcgacagcgagtcacccttctgcacggtataggtgccgccgctgacaacgtctgcggtgctgtccaccgaagcgctgacgccggagaagtccgccttcggcacctgctcggcggtactgtcgacactgccactgacgccggagaaatcggccttcttctcggtactcatccacaactcccgtctgcatgactacgtgattcgcacggtgccatggaggttgttaaatggggatggtgcagatgtgaagccgccccccggggcggctgaacaatcgggggaatggacgcccggtagtgccggccgctggccggctgtgccagggggatccggccttggccgattgccggccagcggccggctctacccgtaaccacctgcgaatcatggtagtgccggccgctggccggcgctcgccgggcatggcccggcgcaacgggcaaccgcctgtggcggttactgccgcagttcgcggtaggtcgcggccggggcggcgatgcccgggctggcacgccaggggttgatatccaggccgccacgacgggtgtagcgggcctccacttccagccactgcggctggcagcgcgcagacacctcgctgaagatccgttcaacacactgctcgtggaactcggcgtgctcgcggtagctgaccaggtaacgcagcaggccggcgcggtcgatcttcggcccgcggtagcgcaggctgaccgtggcccagtccggctggccggtaaccgggcagttggacttcagcagcgccgagaccagggtttcctccaccacctcgccggtatcagcggcgaggaagtctgcctgcggcgggccgtagcagtcgatctccacatccaggccgtcgatggattcaccgagtggcgtctcgcgcaggcccggcaggccgaactcgacctccaccggcgcaccggcgcaggccgacaggtcagccaccaggcgcccacgaagtgcctcggcgctgtcgatacgggtgctgttgagggagttcaggtacagcttgaacgacttcgattcgatcaaccgcggcgaggtgcacggcacctgcacggtggcgacggcgacctgcggcttgccacgcgcgtcgagccagctcagctcgaaggcatgccagcggtcgtggccaacgaacggcagcgcggcgtcatcgaggccgatctcggcgcgggcgccgctgcgggggatgggaaacagcaggccgggatcgtactgcgacgggtaactgacctcgcgaccgaggctggaatcctgtggggtgttcatgggcgccattgtatcgcgcgggcggcgggccttcggccgggccggccaacggcggagcccctccgtggtggttgtgttgccggatacaagagctggccgggagggtgggttggccgggggacgccgtgaatccatccatggaggctcggtcgccgcatccatgcggctcacgcccccagccaacccaccctcccggccacggacaatttcccgcgccaccacgggaaagatcaggaaaatcagaatccgatccttcagacgttcatgacgtccgccgtgccgaccaacggtcggcacccaccaacagcagcgggcaccaacagccgcgggaaactgtcgaaggcggggtgggtccggttgagggggtgtccgcggcatggatgccgcggccaagcccccagggacgggtttacggcgtccccctcaaccggacccaccccgccatcccacggaatgcccgcttttgacgctgacgttgccgttgatccaagcgggtgcagggctgcaagccctgcggaaaccctcaccccgccggggtgccggcactgtgcaggtaatccaggctcacctgcagcagcgcgcggaacccgacatccagcgccttctcatccagcaggaacttcggcgaatggttcgccggcgccgttgccggatcgatgcccgcgctggtggagccgacgaagaagaacatgcccggcacttccttggcgtacagcgagaaatcttccgcacccatctgcagcggtggctcgtatacgttgtccttgcccaccaccgcctgcaggctcggcagcatcttcgcggtcaatgccgggttgttcaccgtggccgggttgccgtcggcttcgtagatctcggtcaccgccttggcaccatgcgcggcggcggtgtgctcggccacgttgcgcaggtcggcgaagatctgctggcgcatgccttcgtcgaaggtgcggatggtgccgaccatctccacttcatcgggaatgatgttgtagcggatgccgccgttgatcgcgccgaaggtcagcactgccggctgcttggacaggttggcgcggcggctgacgatggtctgcgcggtgcccaccaggtcggcggtggcgacgatcggatcaaccccgttccacggcgccgagccatgcgtctggcggccgatcaccttgatcccgaaccggtccgaggccgccatcaacgggccaccgcgcaccgcgatctgacccacctgcacgctggagaacacatgcaggccgaacaccgcttccggcttgaaatcggcgaacaggccttccttcagcatgagtgccgcaccaccctcttccggcggcggtgcgccctcctcggccggctggaagatcagcatcacctggcccggcaggtccttcttcatcgacaccagtgcttcggccacgccgagcagggtcgcggtgtgcgcgtcatggccacaggcatgcatcacgcccacggtctgcccgcggtactggtcagtggccttggaggcgaacggcaggccggtctgctcggtcaccggcagcgcgtccatgtcggcgcgcagggcgatcttcggccccggcttgccgccctcgatgatcgcaaccacgccgtggtgggcgatgccggtcttcggcttcaggcccattgcacgcaggcgcttggcgacctcggccgaggtgcgcgcctcgcggttggacaactccggatgctggtggaaatcgcggcgccattcgaccaccttggcctgcagccgctgcgcggcggcggtcacttccgggcgctgcccgtcctgggcgtgggcaagggccggcagggccagcagcagggcggacagcagcagcgaacggcgcatcgcaatctccacagcagaagggttccagctgaatgtagggcaacaccgccgccacgggaacctccggcgctcgatccggtcttagcgcccgtcccatccgtcatgcaggaaacgtgatgtggcacaggtatgctttgcgcattgccccggcgtcccgcctggtccagccctctcggagtcctcgtaatgtcacgtgtttggaagatcgtgctgctggtcgtggcagtgctggtgctggccgtggtcggcctgcgcgtcatgggcgggggcaaggacaaggccggtggtgcagctgcgggggcgcgccaaggcggcgaggatccgaatgccggtccagtaccggtgaccgtggtggaggccacgcgccaggacgtgccggtgtatgccagcgcgctgggcacggtgactgcgatgaacaccgttaccgtcagcccgcaggtcggcggccagctgatgagcctgaatttccgcgaaggccaggaagtgaagcagggtgacgtgctggcggtgatcgatccgcgcacggcccaggccagctatgaccaggccgccgcagccaagcgccagaacgaagccctgttggccactgcgcgctccaacttccagcgctcgaacgcgcctgagtatcgccagtacgtcgccaagaccgatctggatacacagcgaaaccaagtggcacagtacgaaagcgccgtggccgccaacgaggccagcatgcgttcggcgcaggtgcagctgcagtacaccaaggtcaccgcaccgatctccggcatcgccggcatccgcgcggtcgacgcgggcaacgtggtcaacgccggcaccgcgctggtcacgctgacccagatccatccgatccacgtgctgttcaacctgcccgagcgccagctcggcgacgtgcgccaggcgcaggccgccggcacggtgccggtggccgcgctggaccgtgccgattcgcatgtgttgtccggcgacggcaagctcgacgtggtcgacaacctgatcagtgccgacagcggcacgttcaaggcgcgtgcgattttcgacaacaccgacaacggcctgtggccgggccagttcgtcaacgtgcgcatgcagctgcgcacgatcgccggtggtgtggtcatccccacccaggcggtgctgcgtggcccggatggcgagtacgtctacatcgtgcagggcgacaacacggtaaagatgcagaccgtgcgcagcggcgtggaagtgggcgacagccaggtgcagatcgccgaaggcctgaagggcggcgagcgggtggtcagtgaaggccagttccgcctgaagccgggcagcaaggtcaccgcgctgaagccgggcgagaccccggccgcaccgaccgaggccgaactgaaggcggccgagcagaagaacgcaggcggcggtggccgtcgcggtggtggcccgcgctgagcgcaggccactgatctccctcgcgccggcatacccgccggcgccgacattgaagtgccagcaaggatcagtccgtgggcttttcgacgatcttcatccgccgcccgatcgccacctcgctgttgatggcgggcctgttgctgctgggcatcctcggttaccgcaagctgccggtgtcggcgctgccggaaatcgatgcgcccagcctggtggtcaccacccagtaccccggtgccaacgccaccaccatggcttcgctggtcactaccccgctggagcgccagttcgggcagatttccgggttggagctgatgacctccgactcgtcggccgggttgtcgacgatcatcctgcagttctcgatggaccgcgacatcgacatcgccgcgcaggacgtgcaggcggcgatccgccaggccaccctgccctcgtcgcttccctaccagccggtctacaaccgggtgaatccggccgacgcggccatcgtcaccctgaagctgacctccgacacgcgcccgctgcgcgacgtcaacaattacgccgactcgatcctggcccagcgcctgtcgcaggtgcagggcgtgggactggtgtcgatcgccggcaacgtgcgccctgccgtgcgcatccaggtcaatccggcgcagctgtcgaacatgggcctgaccctggagcagctgcgcagcgcactgacccaggccaacgtcaatgcgcccaagggctcgttgaacggcaagacgcagtcctacagcatcggcaccaacgaccagctggccagcgccgccgagtaccgcgacacgatcatcagctacaagaacggccgcccggtgcggctgtcggacgtggccgaggtgatcgatggcgtggagaacgaccagctggccgcctgggccgatggaaagccggcggtgctgctggaagtccggcgccagcctggtgccaacatcgtgcagaccgtcgagcgcatccgcgcgatcctgccgcagctgcagggcgtgctgccggccgacgtgcacctggagatcttcaacgaccgtaccgagaccatccgcgcctcggtgcatgaagtgcagttcaccctgatcctcaccatcggcctggtggtggcggtgatcttcgtgttcctgcgccggttgtgggccacgatcatcccgtcggtggcagtgccgttgtcgctggccggcaccttcgcggtgatggcgttcgccggcatgtcgctggacaacctctcgctgatggcgctggtggtggccaccggcttcgtggtcgacgatgcgatcgtgatgatcgagaacatcgtgcgctacatcgagcagggcaagagtggcaaggaagcggccgagatcggcgcgcgccagatcggcttcaccgtgctgtcgctgaccgtctcgctggtagcggtgttcctgccgctgctgctgatgcccggcgtcaccggccgcctgttccacgagttcgcctgggtgctgagcatcgcggtggtgctgtcgatgctgatctcgctgacgctcaccccgatgatgtgtgcctacctgctcaagcccgacgccctgcccgagggcgaggacgcgcatgagcgcgcagcggccgccggcaagcagaacctgtggacgcgcaccgtcggcctgtacgagcacagcctggactgggtgctggaccaccagcgcctgaccctggccgtggccggcggcgcgctggtactgaccgtgctgctgtacgtgctgattcccaagggcctgctgcccgagcaggacaccggcctgatcaccggcgtggtgcaggccgaccagaacatcgccttcccgcagatggagcagcgcaccaagcaggtcgccgaagcgctgcgccacgatccggatgtgaccggcgtgtcggcgttcattggtgccggcagcatgaaccccacgctcaaccagggccagctgtcgatcgtgctgaaggagcgcagccagcgcgatggcctggagcagatcctgccgcgcctgcagaaggcggtggccggaatcccgggcgtggcgctgtacctgaagccggtgcaggacgtgaccctggatacccgcgtggccgccaccgagtaccagtactcgctgtcggacgtcgattcggcaacggtggcgacccaggccacgcgcctgaccgaagcgctgcgcaagcgcccggaactggctgacgtggacaacaacctgtccaaccagggccgcgccctggagctgaacatcgaccgcgacaaggccagcgtgctgggcgtgccgatgcagaccatcgacgacacgctctacgatgcgttcggccagcgccagatctccaccatcttcaccgagctcaaccagtatcgcgtggtgctggaagtggcgccggagttccgcaccagcaccgcgttgatggagcagctggcggtggcctccaatggcgccggcgcgctgaccggcaccaacgccaccagcttcggccaggtcacctcgtccaactcgtcgaccgccaccggcatcggcgcgcagaacaccggcatcaccgtcggcgccggcaacatcatcccgctgtcggcgctggccgaaggcaaggtcagcagcgcgccactggtggtcagccaccagcagcagctgccggcggtgacggtctcgttcaacgtggcgccgggctattcgctgtccgaagcggtgcgtgcaatccaggagaccaaggacagcctggacatgcccacccacctgcatgccgagttcatcggcaaggccgccgagttcactggcagccagacggacgtggtgtggctgctgctggcctcgctggtggtgatctacatcgtgctgggcgtgctgtacgagagctacatccacccgatcacgatcatctccacgctgccgccggccggtgtcggcgcgctgctggcgctgatgctgtgcggcctgagcctgtcggtggatggcatcgtcggcatcgtgctgctgatcggcatcgtcaagaagaacggcatcatgatggtggacttcgcgatcgaggcccgccgcgccggtgccaacgcgcacgaagcgatccgccgtgcctgcctgctgcgcttccgcccgatcatgatgaccaccgctgcggccatgctgggcgcgctgccgttggccctgggcaccgggatcggctcggagctgcgccgcccgctcggcatcgccatcgtcggcggcctgctgctgtcgcagctggtgaccctgtacaccaccccggtgatctacctgtacatggagcgtttctccgagtggctggcgcgccgccgcgaacagcgcgccctgcgcgacgggtcgctgcaggagccgcaggcatgatccacgccccgttgctgcaaggggccgcacgatgaacctgtccggccccttcatccgccgcccgatcggcaccgcgctgctggccatcggcctgttcatggtcgggctgatctgctacctgcgcctgggcgtgtcggcattgccgaacatcgagatcccggtgatcttcgtgcatgccagccagtccggcgccgatgcggcgaccatggcttccacggtcaccgcgccgctggaacgccacctcggccagctgccgggcatcgaccgcatgcgctcgtcgagctcggaaggcagctcgctggtgttcatgatcttccagagcggccacaacatcgattcggccgcgctggacgtgcagacggcgatcaactcggcccaggccgacctgccctcgggcatgggctcgccgatgtaccagaaggcgaacccgaacgatgacccggtgatcgccatcgcgttgacctcgcagacgcagtcggccgatgagctgtacaacgtcgccgattcgctgctggcgcagcgcatccgccagatcagtggcgtcgcctcggtcgacatcgccggcgcgtcgacgccagcggtgcgcgtggacgtcaacctgcgcctgatgaacgcgctgggcctgaccgccgatgacctgcgcaatgcggtgcgcgcggccaacgtgacctcgcccaccggcttcctcagcgacggcaacaccaccaccgcgatcatcgccaacgattcggtggcgcgtgcggccgacttcgccgatctggtggtcaagacccagggcgatggccgggtgatccgcctgaaggacatcgccaacgtctacgacggccagcaggatgcctaccaggccgcgtggttcgaccacaagccggcggtggtgatgtacgtgttcacccgtgccggcgccaacatcgtggagaccgtggaccgggtcaaggcgcagatcccgaccctgcgcgactacctgcagcccggcaccacgatgacgccgtacttcgaccgtacgccgaccatccgctcgtcgctgcatgaagtgcagatcacgttgctgatcagcctggcgatggtggtgctgaccatggcgctgttcctgcgccggctggcaccgacgctgatcgccgcagtgaccgtgccgctgtcgctggccggtgccgcgttggtgatgtacgtgatgggcttcaccctgaacaacctgagcctgctggcgctggtgatcgcgatcggcttcgtcgtggacgatgcgatcgtggtgatcgagaacatcatgcgccacctcgatgagggcatgccgcgcatgcaggcggcgctgaccggtgcgcgcgagatcggcttcaccattgtctcgatcaccgcctcgctggtcgcggtgttcatcccgctgctgttcgccagcggcatgatgggcgcgttcttccgcgagttcaccgtcaccctggtggcggccatcgtggtctcgatgatcgtttcgctgacgttgaccccggcgctgtgcagccgcttcctcagcgcccatgaccacagcgcgccgccgtcgcgcttcggacgctggctggatgccggccacgagcgcatgctgcgcatctacaccgtgttcctggacttctcgctgcgccacgcgctgctgctgtcgctgacgccgctgatcctgatcggcgtcaccatcttcctgttcggggcggtgaagaagggcgcgttcccgccgcaggacaccggcctgatctggggccgcgccaattccagcgccaccgtctccttcgaggacatggtcgcccgccagcgtcgcatcaccgacatgctgatggccgacccggcagtgaaaaccgtgggtgtgcgcctcggcagcggccgtcagggctccagtgcacagttcaacatcgagctgaagtcacgcagcgacggtcgccgcgaaaccaccgcacatgcgttggcgcgactcagtgccaaggccgatcgctaccccgacctgcagctgcgcctgcgcgcgatccaggacctgcccagcaacgatggcggcggttccagccagggcgcgcagtaccgcatttccctgcagggcaacgacctggctgctttgcaggaatggctgcccaagctgcaggcgaaactgaagaagaacccgaagctgcgtgacgtcggcaccgacgtggacaatgccggactgcgccagaacatccagatcgaccgcgccaaggccgcgcgcctgggcatcactgtcggcgccatcgacggcgcgctgtacggtgcgttcggccagcgccagatctccaccatctattcggacatcaaccagtacagcgtggtggtcaacgccctgccctcgcagaccgccaccccggcggcgctggatgaggtgtacgtgcgtgcgcgcaacggcgacatggtgccgatcaccgcggtggccacgcagatgcccggcctggccccctcgcagatcacccacgagaaccagtacacgacgatggacctcagctacaacctggctccgaacgtgagcatgggtgaggccaaggcgatcatcgatgccaccgtcgccggcatgcgcatgcctggcgacatccgcctggccgacgatgcgggcttcggcttcaattcagatcccagcgacatgctgatcctggtgtttgccgcgatcctgaccgtctacctggtgctgggcatgctctacgagagcctgatccacccggtcaccatcctgtccacgctgccggcggcgggcgtcggtgcgctgctggcgttgttcggcaccaacaccgaactgtcggtgatctcgatgatcgcgctggttctgctgatcggcatcgtcaagaagaacgcgatcatgatgatcgacttcgcactggtggcgcagcgcgagcatgggctggcgccgcgcgacgccgcacgcgaggccagcatcgtgcgcttccgcccgatcatgatgaccacgatggtcgcgatcctggccgccgtgccgctggcgatcggcctgggtgaagggtccgagctgcgccgcccgctgggcatcgcgatgatcggcggcctgctgttctcgcagagcctgacccttctcagcacgccggcgctgtacgtgatcttctcgtgcctggccgagcgttggcgcgcacgccgcgcacgcaggcgcgaagccaagctgctcaagcgcgcgcagcgggcgtagaagggcccatccacgcgcggcgtggatctatgggtagagccggccgctggccggctttctccgtaccgcaaatctgccggccagcggccggcactaccggattcctgcgcgggctgtccccttcaccccacacccgcaataatggtcggagacccttccgccgagcctgcatgtccgcccgacaatcccgcctcagccgcctgtgggcccacgagaaggccagttacggcctgcgggtgttcatcgccctgaccgcggcgctggcggtgtgctggcagctggatgcgctgaccgccttgcccggcgtgttcctcggcatcatcgccagtgccatcgccgaaaccgatgacaactggtggggccggaccaaggcggtggcgctgtcgctgttgtgcttctgcattgccgcagcatcggtcatctggctgttcccgtggccgtggatcttcatcggcgcgctggcgctgtccaccttcggcctgaccctgctcggcgcgctcggcgagcgctatgcgtccattgcccaggccacggtgacgctggcgatctacaccatgatcggcctggaacagcacggtgccagcgacctgcacagtgcgctggaagcggtcagccacctgctggccggtgcggtctggtacggcctgctgtcgatcctgtggaccgcgctgttcgccaaccggccggtccgcgagcgggtggcgcgactgtacgttgagctgggccgctacctgcagctgaaggccgcgctgttcgagccggtgcgcgaagccgacctgcaacgtcgccagctcgacctggccgaacagaaccgccgcgtggtcggcgcgctgaacgaggccaagaccgcgatcctggcccgcttcggccgctccggccgacccggcgtgaactccggcctttacctgcgcctgtactacatggcgcaggatttccacgagcgcgccagttcctcgcattacccgtacggcgcgctggtggacgcgttcttccacagcgacgtgctgtaccgctgccagcgcctgcttgacctgcagggacaggcctgtgcccgcctgggcgaggcaatccggctgcgccgtccgttcgtgtacggcgaaggcaaccagcaggccgggcgcgacctggccgatgcgctggcctacctgcgcgaccagcagcggccgcaatggcagcgcctgctgggctcgctggacctgctggtgcacaacctgcgcagcatcgaacggcgcctgctggatgccgagcgctccgaagccagcctggacaacgtcgatacccgcctgcgcgacagcaacccacacaccctgcgcgagatgggcgtgcgcatccgccagcagcttacgcccggctcggtgctgttccggcatgggctgcgcatggcgctggcgctgattgccggctttgcagcgatccgcctgttcaatgcgcagaacggttcgtgggtactgctgaccatcgtgttcgtgtgccggcccaacttcggcgccacccgccaacgcctggcccagcgcatcgtcggcaccctggccggactggtgctgacctgggcgctgctgcagctgttcccgcagctgcacgtgcagctgctgatcgccttgctctctgcacttctgttcttcttcacccgcaccgaccgctacctggtggcgtcggcggcgatcacggtgatggcactgacctgcttcaacctgatcggcgacggcttcgtgctgatcgtgccgcgcatggtcgatacggtgctgggttgcgcgatcgcagcggcggccgcgttcctggtcctgcccgactggcagggccggcagctgcatctcgtcctggcacgcgtgctggacactgcggctcgctacctggattcggtgctgggccagtaccgcagcggcatgcgcgacgacctggcctaccgcatcgcgcggcgcgacatgcacaatgccgatgccgcgctgtccaccgcactgtcgaacatgctgcgtgagcccggccatgtgcgccgcaatctggatgccggcttccgcttcctggcgctgtccaacacactgctgggacacctgtcggcgctgggcgcgcatcgcgaccaggtggacagctatgcgggcgacccgctggcattggcggccggcgagcgcgtgcgcaaggcactgcagcaactggcctcggcgctgaccgcacggcaaccggtcgccgacgatgacaacgacgccgaccgcgcggtggccgccgagctggagcagatcgacgaggcgatgccgccgaaactgcagctgatccgcacgcagatggcgctggtactgcggatgctgccgaaggtgcgggcagcggccaatgaagcggtgaccagcctgacctgactcctcatcgctgatcggagagcccacccacgcgtggcatgggtcaattgcgccgtgtgcaacggcgcgttgcgcctggcgctgcggttcgatcacgcggccgcgcggatactgggcaatccccccgctccggactatcgccatgaaaatcgagctcagtggccgcaccgcgctggtcaccgcctccaccgccggcatcggccgggccatcgcccaaggactggccagcgctggtgcgcgtgtcattctcaatggccgcagcaccgacagcgtcgagcgcgcccgccggcacctgctcgccaccgtgccgggagccgacgtgctcggcgtcgccgccgatctctctgatgcagccggtgtcgaaacactgttggccggcctgcccaaggtcgacatcctggtcaacaacgccggcatcttcggcccacaggacttcttcgagaccgatgacgcgacctgggagcgctactggcagaccaacgtgatgtccggcgtgcgcctgtcgcgtgcgctgctaccggcaatggtcgatgccggctggggccgcgtgctgttcatttcctccgaatcagcgcgcaacattcccgccgacatgatccattacggggtcagcaagaccgcgcagctgtcgttgtcgcgcggcctggccaagcgcgtggccggcagtggcgtcaccgtcaacgcggtgctgcccggcccgaccctctccgatggttttgcggcgatgttcgaggatgaacgccagcgcagcggcaagccgctggagcagatcggccgtgagttcgtgatggcgcaccggccgtcctcggtgatccagcgcaccgccacggtcgaggaagtggccaacatggtggtgtacctggcctcgccgcaggcctcggcaacctcgggtgcggcgctgcgcgtggatggcggcgtggtcgacgatatcgtctgagagtgctggcaggtgtgcggaccaacggtccgcacccacaggtccgcatccacagcggaggggaaggaatgctaggctgcgccggtcaaggaggttccatgtccggtcacaaccagttcgccctgctgcgccagcgccgtttcctgccgttcttcgtggtccaggcgctcggtgcgttcaacgacaacgtgtaccggcaggcgatcatcagcatgttgctgttcatggctgtgccggaggaagaactggggttgtacgccaccctggcaccggccatcttcatcctgccatatttcctgttctcggcgctggccgggcagatcgccgacaaactggaaaaatcgcgactgatcgtgatcaccaccaccatggagatcgtgatcatgtcgctggcggccaccggcttcctcacccagagcctgccggtgctgctggtcgcgctgttctgcaccggcatgcagtccaccctgttcggcccggtgaagtactcagtgctgccgtcggtgctcaggccagaagagctgaccggcggcaacggcctggtcgagatgggcacctcgatgtcgatcctctccggcatgatcgtcggcggcctggtgttcaccgtggctggcagtcacggcacggtggtggccgcgtgcgcgatcatcgccctggcgatctgcggcaacatcgccgcccgcctgattcccaaggtcgatgccggcgacccgaatctgaagatcaactggaacccgttgccggaatcgctggcggtgctgcgcatggcgcgccagcagaaagccgtacgcaactcgatcctgggcgtgtcctggttctggttcgtcggcaccgtgctgacctcgcagttgccggcctatgcggtgaccaacctgggcggccagccgaccctgtacatcttcgcgctggccctgttctcggtgggcaccggcgtcggctcgctgctgtgcgagaagctgtcagcacgtacggtggaaatcggcctggtaccgctgggcgcgttcggcatgaccgcgttcctgctcgacctgtacttcgcccgcagcggcgaagcgacagtgcacgggctgaccatcgggccgttcctgcagcagcccggcagcatccgcatcgtcatcgacctgatcggcatcggcctgttcaccggcatcttcgtggtgccgctgttcgcactgatccagagccgcacgccgaaggcgcagatgtcgcgcgtgttcgccgcactgaacatccagaactcgggcttcatcgtcgctgcggcgctgctgtcgctggccgcccacaagctgctgcactggaccattccgcagcagttcctggcgctggccatcgccaacgcgctggtggcgatctacatcttcaccatcgtccccgaattcctgatgcgcttcctcagctggctgatggtgcgcaccctgtaccggctgcgcccgcacggcatcgaagccaacgtgcccgacgaaggcgccgcactgctggtctgcaaccatgtcagctacatggacgcactgatcctgtcggcgacgattccgcgtccggtgcgcttcgtcatgtactacaggatcttcaacatcccggtgatgcgctggatcttccgtaccgccaaggcgatcccgattgccggggcgcgcgaagacccggcgctgatgcagcgtgcgttcgatgagatcgacgcggcgctggccgaaggcgaactggtctgcatcttccccgagggcgcgctgacccgcgacgggcagatggcgccgttcaagtccggcgtcgagaagatcctcgagcggcggccggtgccggtggtgccgatggcgctgcgcggcatgtggtcgagcatgtggagccgccgcgacagccgccttggccgcatgcgggtgccgcgtcgtttccgcgccacggtcgaggtggtggcggcaccggccgtggatggccgcaccaccagcgccccggtgctggaggcccaggtgcgggccctgcgtggtgatcacgcctgatcgaccgcacggacacgggtagaccgtcccagcgacaagcccccatcctcgccctccgatgcatcgcagaggtccgtcagatgcgtcagatcaagggccataccggccagtatctgactgtaaccgcatacatgcagcgcgggttgaggtagattacgcacccacaggggggaggttcggccgtttcatcatggccggccaccaaggaatggagtcttgctttgaatcaaccgccaccgctcagccgcccggtctacatccccaaccatctggtctgggcgatcctgacgacgctgttctgctgcctgccgttgggcgtggtgtcgatcgtctatgcctcccaggtcgatggccgccgcgccgccggcgacctgccgggggcctacagtgcgtcgcgcaaggcgggctggtgggcggtggcttcggccgtggccctgccggtcctgttgctgttgtggttcgggctgttcggcggcttggccgtactgggcgctctttccgaccaatgattcaccaccatcacccatcaaggagcttgaacccatgaacaccgccactccgcaggtcccgaacaatctggtctgggccatcctgagcaccctgttctgctgcctgccggccggcatcgtgtcgatcgtctacgccgcgcaggtcaacggcaagctggccgctggcgacatcgccggtgcccaggactccgccgccaaggccaagaagtgggcgatctggtcggccatcgccgccgtcgtggtcggcgtgctgtacggcatcctgatcgtcgctgtcggcggcatgggtgcaatgaacaacagcggctactgatccgcgtggacggatccggcgcccgcgccggatccgttgctgcaatgtccgcacttcccgcccgctcccgattcgcccgctgggcaccgctgctggccgccaccggcctggccgccggtgccgcggtggtgctgcgcaacgtcaatccgtatgtcgccggcaatcctttgccaagctgcccgctgtacgcgctgaccggcctgtactgcccgggctgtggcagcacccgctgcctgtattcactggtccatttcgacctgcccggcgcgatggcgatgaacccgctgctggtcatcagcctgccgttcctgctgctgatgctgctgaacgtcgccggcatccggccgcgcgtgctcgacccgctgatgcgggtactggccaatcccacgttctggctctgggtgctgcccgggtatgcgctgctgcgcaacctgccgtgggcaccgttcaccgcactggcaccgatctaggttttccagccaacggcgcggcccctcgcggtgggcgacgtttgaaggcaaaagccctggggttggccggacgggatgggtttgcgggggacgccgtgaatccgtccatggagtcttggccgcggcatccatgcggctcacgcccctgcgcagcccacccgcccggccacggacagtttccgtgtgcgtccaccacggaaaagaaagagaagatcaaaagcggaagcggatcgcttcgctctgtatccacgcatggcgtggatcgaccgtgtcgaccaaggtcgacacccaccggcagtcgcggttgacccaccgtcaccgggaaactgtcgggggtggggcggtgtggggcagcaggaccgttggcgccatggatggcgccatcgagcccccagggacgggtttacggcgtgtcctgcagccccacaccgccccgcccaaccctcagcaatccagagccgctttggctctggcattggctttggcctctgcaggtgcagggctgcaagccctgcaaagcaactacgtcacccagcctgcaatcaccagcagggcgaggaccgccagccacagcagcagcatccgccacaccaggctcatcgcatcacgcaggtccggcaaccgctgccacaccggcagcaaccctgcctcggtgtaatcgtgcgcatcctcacgcagctcggcgttgacgctggcccgcgccaccgcgccaaggaacccgatgttgccggccaggcgttcgccatgggcctggcgccaggccttccacgccgtatcgaaattgcccaccagcgccatcgagaatgccatcagctgcgccaccggccactcgatccaacccagcaggcgctgcgccagcgccagcggctccaccggcacgcgtgcgcgcatcgggctctccgccatcagcgccagcagccggtaaccgagcgcgccagccgggcccagcaacaggaaccagaacagcaccgcgaaccagcgccgcagtgcgttgagcaccgtcgcctcgaccagtgacggaatgtcctcgcgcaggctgccgccggccgactgcaggttgcgcactgcagcctgccgcgtcgccgcatcatcggcatcgataatggcctcgatatcgcggtccaggtcacgcgggccccagcaccaggccagcaccgccacgcccagcagcagcgacggcaggccgaacagcaccccgcgcaacagccacgccagcagcaccatcagcaacagcggcggcagcagtgccaaggcaacgccggccggtccctgccaggccttgccaccacgcgcatccagccagcccagccaacgccggaaaccgtcgaaacggcgcagcgaggcagcagcggccggagcaacatggcccagggccagtgccaccagcacggcggccagagtggtgaacatggcaggtctccctacgaaacagaacgctcggcgccgctaccttacctgtcgcagcggcgccctccgcgatgacccgcactgtaacccgggccgtgttcaggtggcggcaatgcaatcgccccagccggcccggctcagcccttctgctgccggtaccaatgctcgatcaggccgcgcgaaatcgagatcggcggcgacaggcggataccctggccatcgtcctccacgtcgcgcgccagtgccgcgccgacctcgtcggcactgaaccagcgcgcgtcttccagctcaccgtccacggtcggcaggtcatcctgcgcctgtgcgcggaagccaaccattagcgcacccgggaatggccagggctgcgaaccgaggtactggcaggccgtcacccgcaccttgctctcttcatggacttcgcgcaccacggtctgctcgaaggtctcgccgggttcgacgaagccggccagcaccgagtagcgacgcggggcccagttcgactgccggcccagcagcagccgcccctggttttccacggcgacgatcaccgccgggtcgacacgcgggtagtgttcggtggaacactgtccgcagcggccgacgaagccaccacgggcaaacgccacggcgccgccgcacacgccgcagaagcgggtgcgcgagtgccagtacgacatgccgcgggcatagctgaaggcggtcgcatcggccatcgaccacagcagcgcggcctggcgcagatcaagccggcgtggtgcgctgatggtgacgttggtggcttcaaccgagaaccacgcctgctctccgcgcaggccgaggaagatcgcggcacccgggccgccgccgatgtcggcgccggtcagcgccagtggctgatcgtcatcgccggtgaaggcgctgccgtcctgatcgagcacgagaatgcgcgcgcccggccacaggcgcgccagtgcatcggcatcttcgcgcagggcatcggcgcgctccagcggttcacccacgaaggcgaaaccggaaagcggcgaaggagtattgggcatcctgcaagcgtgccgccaatcgatgcgggtggcaaggtcggcgctgtgcgcaatctgccgttgtggatgcaggaaggatcatccacgcatggcgtggatctacccgctctggcaggtgccaaccctggttggcacattccggccacaggcctcttacatgctgaagctgctgccgcagccgcaggtggtctttgcgttcgggttgcggatcacgaactgggcaccggtcaggctctcggtgtagtccacctcggcgcccatcaggtactgcaggctcagcgggtcgaccagcagggtcaccccgctggtctgtaccgccaggtcatcctcggcacggttctcgtcgaactcgaacccgtactggaagcccgaacagccgccgccctcgatgtacacacgcagggccaggtcggggttgccctcttcctggatgagggatttgaccttggcggccgccgactcggtgaagttcagcgggcgctccagcgattggtaatcgggcgcggcaaccggggtggcgccgggcagggagactagcgtgctcatggtgccagcatgggggtgccggggatggctttcaagccatcgcctcggccagcttgcggcgtgcggcggtgtcgcccttgccgctattggcttcatcgccttccggcgccggcagggccgccatcggggcgctggcatggatcaggcggccgttcagctgggcgcccgcattcatctccaccacctggtaatggacgttgccattgacccgtgcgctgggggtcagctcgaccttctcggtggcgtgtacatcgccgtccaggcggccgctgatgaccaccacctgggcccggatctcaccctcgatcacgccatgctcggcgaccgtcagggtcgcgccgctggcgccttcggtggcgatcaccttgccgtggatgcgaccttccacatacaggccaccactgaattccacatcaccgcggatcaccacctggttgccgatcagggcatccaccaccagctggccttcacggttggatttgctgcttccgaacatctgcctactcccctttgctggccggcgcgccggcctgtttccagtcgaatacctgggtggtaccccccgtaccactccccaatgtcacccgcacgcgttgcggggtgaagtcagccggcagcatcacgctaccggtgagctgctggaagtaccggaacgagtaatcctgtcccggcaccttgctgcgctggtgcagatcatcccagctgatcgtggccagcttgccgttcttcacgccttccacggtgaagcgcatctgcccctggctgatggcgccgcggttgaggttctgggtcagcacggcggtgtactgccaggtgccggccgcttccgggctgaactcgatcgaatgggtgttcaggcccttgcgctggctggtcgaacccaccaggcgctcatagaaggcaacgtcggcgcgcaggccggcgatttcctcatcgcgctcggccagcgaggactgcacctcggtattggcggcgcggctgatgcggtcggaggcttccagcgtggcctgcttctggcgcagctcggtcagctgcgcctgcagcgtctcggcgcgcttctcggcagcctgcaggcgctggccctgggcatcgcgtggcgtggccatccagcagccacccagcaccgccagcaccaggctgagcagccagatgccgccgatcaccagcaggcggcgacggtcggccggcggttgcggcgcgccgggcaggcgtacctgcacgcgcatgggaggacggttggtcatgggtggtttccggggtatcgcgagggcgacaccggtacggcccctgtggcaaacgacgggctagtgtatgacaggacggaggggtttcctgcgccgtggccggccacggtctgtggcgttcaggcatgccatcgtcgatagtgtggtcccctgcacagttccgtcgccggagcatcgccatgaccgaagcccacctgttcgtgatcggcatcctgctggcctggctggccggcatccgcgtctacctcaccgtgttcggcgtcggccttgccggcctgctcggctgggtcgacctgccgcccgctctgcaggccaccgaatcctggtgggtgctgggcacgtcggcggcgctggccatcgccgagttcttcgccgacaagattcccggcgtggactcggtctgggacctggtgcagacgctcgcacgcgtgccggccggcgcgttcctcgcagcggctaccctgtcgccggacggtcagctcggcgccggcgcactcgccgccggtgccggcgtcgccctcgccagccacggcctgaaggccggtacccgcgcgctgctcaatacctcgccggaaccggccagcaactgggtcgcctccgccgccgaggacaccgtggtagtcggtggcctggcgctggccctggcacacccgtggatcgcgctggtggtggtgctggcctgcagcctggccggcgcgctgctggtgtggctggtctggcgcgcgctgtggaagggcgtgcgctggctggcgcgcggtgcatcggcagcaccgccggggcacagcagtaccggttgagcaccgggcttgtcgcataatggacgcgaacaccaggagcaccgatggccgcaaacgaatcccccgcgggcgcccgcccgggacgcgctgaaacccctccggccgatcattggcagcgctgggcgcccgaggcggcaggccccgctgtggccgcaccgacggttgcgaccccgccgcccatcgcgaccgatgccctggcgccggtcaacagcgcaccgccgccgctgcccggcccgatcgcactggccgaagccggcaacaacgatctggccccgccgccctcggactcgccctaccgcgtgctgatcgttgaagacgatcgcgcccaggcgctgttcgcgcagagcgtgctgcacggcgccggcatgcaggcgatcgtgcacagcgatgccgatgccgcgctgcaggcgatcaaggagcaccgccccgacctgatcctgatggatctgcacctgcccgggctggacggcatgcgcctgaccgcgctgatccgccagcagcccggcctgcagctgctgccgatcgtgttcctcagcggcgatccggatccagagcgccagttcgaagtgctcgacagcggcgccgacgactacctgagcaagccgatccggccgcgccacctgatcgcagcggtggccaaccgcatccgccgcgcgcgtgcccaggccgcgaccctgccgggcgccaccggcgcaccggccaccagcaatccggaaaccggcctgccgacgcgccaccatgtgctgcagcagctcaacaccgcactcgcccaccgcgaccggggcggcgtgttcttcatcgaagtggccagtgcgctgggcctgcgcgaacgctatggctatgccgcgtttgaacgactgatggtgcaggccgggcagcgcctggccgaagccggccatccgcacctgctggcgcggctgaacgacaacagctttctgctgctggcccgcaacgccgacgaggacgccctcgaaggcatcgccgcgagcctgcgcgagcagctgtcggcccgcgccttcgtgatccgcgacgacgaatccgtgcatctgcgcggcgtggtcggttatgcgccgctgtcgccgggcttcgaggatgccagcagtgcgctggaagcggttgagcgcaccaccctgcaggcgcgcctgctcagcgccggcgtggcgggccatgtgcatcgccaggcggtcaccgaacaggaacacctggcgctgctggagggccagctggaactggcctaccagccgatcgtcgccgtggcaggcggcaacaccgcgcaataccagttgctgctgcgcctgcgccaggccgatggcacggtgctggcggccggccaggtgatccccgccgcggaagccgccgggcgcatcgccgacctcgaccagcaggtgatggaccacgcactgggcctgctggatctgtaccggcacgcaacgcagccgctgagcctgttcgtctcgcagtcgctgcgcaccctgcagcgcgatgccttcgccgactggctgctggaatcactgcagcagcgtgacctgcctggcagtgcgctggtgatcgacgtgcgcctgcccgacgcactgatccacaccgtgccgctgcagcagttctgccagcgcatggccagcgcaggggtgcgcttctgcctgagccagttcgaacccagcggcgaggccgatgcactgctgacccagctgccgctgtcgttcgtgcgcatggctgcgcgcttctccagcagccattccaatccggccacgcgcgaggcgctgcgcaagacgatcgaacaggcccatgccgccggactgcagatcatcggccagcagatcgaggatccgcaggctgcagcggcgatgtgggtaggcggcgtcgactacatccagggcaacatggtgcagtcggccggcagcgacctgaacttcgacttccacaacgcggtgctctgacgtgccgctgtggggcgtgctgctggttgcccttgctgcggccgccatcgcgctgctgctgttgggcctgcgcctgcgcgcgcgcaaccatgcgctggcccagctgcagcgcacgcacagtgcgctggccgccgaacgcgaccagcttcgccataccaccgaacgccagggccagctggaacaacagctgctgcaggccaagcaggccgccgaggcggccgtgctggccaagggcgagttcctggccacgatgagccacgagatccgcaccccgctcaacggcatcctgccgatgctggagctgatcgcacgcgggccgctgggcgaagaccagcggcagatgctggccaccgcctcggccagttcgcaacagctgctgcgcatcgtcgacgacatcctcgactactcccggctggaagcgcaggcgctggaactggagatcaccagcttcaacctgcgcgacctgctcgatggcgtggtacagctgatgcagcgggccgccgacgccaagggcctggccctgggcctgcaactggatccatcggtgcgcctgccggtgcgcggcgacccggtgcgcctgcgccaggtgctgagcaacctgctggccaacgccatcaagttcaccgcccgcggccaggtgcagctgcgcgtgctgcgcctgggtgaaagtgccgcgcagcaccagctgcgcttcgagatcatcgataccggcatcggcatcgacgacgcgctgcaggcacgcctgttccagtccttcagccaggccgacgcatccaccacccgcatctatggcggcaccggcctgggcctggccatctgcaagcgcatcatcgacctgatgcacgggcacatcggcgtgcactccacgccgggccagggcgcaaccttctggttcgagatcccgctgctgaaggtcgctggcgacctgccggcgatggcgcgcgcaccggcaccgctgctgctgttcagtgccgatgcaacgctgcaggcacgtatcgagcgcatcgccgcccaccatgggctgcaggtgcaggtgctggcacagctggatgccgtggtcgagcgcctgcgcgctcccgcgcggcccggacaaccggcaccggcatggctgctggtcgatgcccgcgcacgccgcaacggtgaggccacgctgcagctggcgctgagtgaacgtggtgacgacgatgcgctgcaggtgctgtggctgcaggagggcgcacttccacaacgccagcgccagcgccagctgcccccgcacttcgacgatgcggccctgcatgcactgctggctgcaccggtcgcccccgcccgccccgctgcgctgctggccagcgcggacaacgagcaaccggctgccacgctgccgctgttgcatctgcgtgtgctgctggtggaggacaatacggtcaaccggatggtcgccgaacaactgctgcgcgtgttccagtgcgaagtgcgcaacgccgccgatggcgagcaggcgctggccgccctccgcgaaggcggcgtggacatcgtgttgatggattgccagatgccggtgctggacggctacgccgccacgcgccgctggcgcgccgaagaagtggagaccgggcgcgcccgcctgccgatcatcgccatgaccgccaacgccatggccggtgaccgcgagcgctgcctgcaggcgggcatggacgattacctgtccaagccgatcgcgcgcgccacgctgcatgcgctgctgctgcgttggggtggcggcaaagctgcatcacctggacaattttctgtggagccgtctgtagagccgagccatgctcggctgacggccagtggcactcccactccatcagccgagcatggctcggctctacaggagacgacaagccaagccgcgccgaaaccggtgatcgaccgcgacgtgctggatgaactgcacaccgtgatcggcgacgctgccacccagatcgtcatggtctttcttgaagatgcgccggtgatggtgcagcagttgcagctggccgcgcagaacggcgatgagctgcgcttgcaggccacagcgcacagcctgaagtcatcgagtgcaaacgtcggcgcattgtcgctgtcggcgatcgcgcagcggatcgagcacgaagcccgtagtggcagcctgcagcgccccgcggtggcggtggcgctgctggttgcggaattcgcccgggcgcgtgttgcactgacgggctacctggcacagcaccgcgccggccagggcggctgactcactcttccagcttgctcagcaggtacttcggctcgccgatacgctcgatcaggtccagctgggtttccagccagtcgatgtgctcctcttccgaatcgaggatcttcacgaacagctggcggctgacgtagtcgccaaccgaatcggaataggccacggcctcgcgcagggtgaccacgccatcgcgttccagcgacaggtcgcactgcaggatctcggtcgggttctcgccgatgcgcagcttgcccagcgcctggaaattcggcaggccttcaaggaacaggatgcggtcggcgagcatgtcggcatgcttcatctcgtcgatcgattccttgtactcgtgttcggccagttccttgatgccccagttcttcagcatcttggcgtgcaggaagtactggttgatcgcggtcagctcgttgtagaggaccttgttgaggaattcgatgaccttggtgtcgcccttcatgggggtgctcctgcacgctgaaaacgcaggcactttaacgcctcgcgtgcgctcgtgaaggaacgcgaatcgtgcgcattggcctgcgcggccgaaggtgaaggatgcgaaagcgcggcgtcaacgcgccgcgaaaaggcgatcaggcgacctgcgccaggcccaataccggcagcggcagatcgtgggtcgcacgtgccttggccagcaggtcgccggccatgtccaggcaggaaccgcaggtggcaccacaaccggtacgcatggtcagttcggccaccgtgctcacgccatggctggcggcttcgcggatctggtggtcggtgactccgttgcagatgcagacgtacacaggcgggaaccgggctgacaggccacaagcggcctggtggctattccaatggaaacgagaatggttgtcaatcagagacctgaaccattctcgataccgttcagccggtcagctggctgggccgtcgcccgtgaccttcttcggccagtaccctcgggtccgcgggcgcttgcgcgggcggtcgtgcccggcggtgtggcccggcatccaggcctcggcggcgctcttgggcatggcggtgacgccctgcccggccacgccacgcgccagtggcgccaggtgtcgcagggcacgcgcatagacgccgcgtttgaacatcaccacgtgctctaccgggtaccagaagtcgacccagcgccagtggtcgaactcgggcgagtcggtgtggtccagcgtcacgtgggattcgtcgccggtcaggcgcagcaggaaccagacctgtttctggccgatgcagacctgccgctcgttgcggcggatggcccgcgccggcagcttgtagcgcagccagccgggcgtggccccgagcacttccacatgctcaggcagcaggccggtctcttcctgcagttcacgatacatggcctcgacaggcgtctcgtcggtgttcatgccaccctgcgggaactgccagccatcccggcgcacgcgtcgtgcccagaacacctggccgtcctgccgcatcagcacgatgccgacgttcggtcgatagccgtccggatcgatcacgatgcggactcctaagaaaatctactggtcgggactatcccatgccctctgtcggcccacaagcacgacacaaaagtgttgacagggtcgatacacatccgcagaatagcgggctcaccaaggctatgtagctcagccggttagagcacagcactcataatgctggggtcggtggttcgagtccacccatagccaccacactgaaaatcaagttgtttttcagtgtgaaaagtgagaaaatagttgcacgttttgccccgtcgccaagcggtaaggcacctgactctgactcaggcattcggtggttcgaatccatccggggcagccaaattaaaagcaaaaggccagatcgaaagatctggccttttgcttttaatttggtcgcgcatcccaccttatccccgcgcctgtcggcgcgcgcccttgaacatcaaggcggctcccctccagagagaggcccggggtcggatccttctccaaaggaaaaggctctgaccccccccttccgagatgcgaaaccccgggtagtgccggccgctggccggcaaccacgaaatgcctgactccaaaacgacaaaagcccggccgaagccgggcttttgcttttccaaccagcgggctcccgcaggagcccaaccaggcgcggtaaatcagcgcttggagaactgggtggcgcggcgggccttgtgcagaccgaccttcttacgctcgacttcacgggcgtcacgggtcatgaagccggccttgcgcagctcggacttcagggtttcgtcgtactcgaccagcgcacgggcgatgcccaggcggatcgcaccggcctggccggtggtgccgccgccagcggcggtgaccaggatgtcgaagctttcggtgttcttggtcagctcgagcggctggcgcacgatcatgcgcgcggtctcacgaccgaagaactcgtccagcggacgaccattgacggtgatgttgcccgaacccttgcgcaggaacacgcgagcggtggaggacttgcggcggccagtgccgtagttttgagtgatagccatgattagatatccagaacctgcggctgctgtgcggcgtgcggatgctcagtgccggcgtagaccttgagcttgcggtacatctggcgacccagcgggcccttcggcagcatgcccttcacggcgatctcgatcacgcgctccgggtggcgctccagcgcctgggccagggattcggtcttcaggttgccgatgtagccggtgaaacggtgatacatcttgtcctgcagcttcttgccggtgacggcaatcttttctgcattgatgacgaccaggtagtcgccggtatcaacgtggggggtgtagaccggcttgtgcttgccgcgcagacggcgggccagctcggtggcgagacggcccagggtcttgccctcggcgtcgacgaggtaccagtcgcgctggacggtctcgttcttggcagtgaaagtgctcatgaagaactctaggttaggtcgggctcattgcggcgaaggactcgccggaactctgccacgcgttgtgaaaggtgaagcgcaagaggcgggattgtacgcaggtcacgccctcggtgcaagctggccctgccccgggttggcaggggagcgggggcgggcgagaatcggcgggtctcccgccccaccgcgtgccgccatgaccgtgctccgccagaccaccccgctggaccacctgctgaccgaggcgcagcgcgccctggacacggtgttcggcaaccctccggcggcccgcccctacccggccgcaggcaccggcgagccgggcatggaccgcgccgagcgccgccacgccgcggggctgatgcggatcaaccatgtcggcgaggtctgcgcacagggcctgtacttcggccaggcggccgtggcccgcgacccggccacccgtgaacacctgctggaagcggcccaggaagagaccgatcacctggcctggtgcgcgacccggctggatgaactggacagccgcccgagcctgttcaatccgctgtggtacgccggcagctacaccatcggcaccctggcgggtctgcgcggcgacggctggaacctgggcttcgtggttgaaaccgagcgccaggtggaagcccatctggacgagcacctggtcgacctgccggccggcgatctgcgcagccgcgcggtcatccaggtgatgaaggaggacgaggcccgccatgcggagcacgccgaacaggccggcgcacgccgcctgccgttcccgatcccgggcgcgatggcgctggcttccagggtgatgaagaccatcgcctaccgcatttgaagggtcgcccgcaccaacggtgcgggcctaccaggaggtgcggggggggcgacggtggggcccgaccgttggtcgggccatcaatcagttgggcgagaccagcttcaggccgatcacaccggctacgatcaggcccacgcaggccaggcgggccggcgacgcactgtcgttgaacagatagatgcccagcaccgccacgcccatggcgccgatgccggtccagatcgcgtaggcggtgccgaccgggatgctcttcatcgcctggctcatcaggtacaggctgatcagggcggacaccaccgtggcaacggtgggcaggggtttgctgaagccttcggagtacttcattccgagggcgaaaccgatctcgaacaggccggccagcagcagatagatccagggcatgggtgggggctccttacctttttgggaaaaacgaaacggcccggtgttttcacaccgggccgtgggtcggtacatcaccgtggaactgtaacgcgtgcggggcactggttccacggggcgggtcgtcccgcctgggcggcgatgcctgcgggcatcgcacatggggcttactcggacaggttccggccgtggaacagctcttcgatctcgcgcttgagcagcgcttcgatcttcatgcgttccttgaacgacaggttcttggccttttcctcgaacaggtactggtccaggtcgaagtccttcaggtgcatcttcgtgtggaagatgttttcctggtagacgttgacgtcgaacatctcgtaacgcgacttgatgttcttggccaggaagttctggatcgagttgatcttgtgatcgatgtaatgcttcttgcccttcacatcgcgggtgaagccacggacacggtagtccatgatcacgatgtccgattccaggctctcgatcaggtagttcagggccttcagcggcgaaatgacgccacaggtcgccacgtcgatgtccgcgcggaacgtcgcaatgccttcctgcggatgggtttccgggtaggtatggacagtgatgtggctcttgtccatgtgcgcgaccacggcgtcgggaatcagctccttgccggcctgcttcttgtcgatcaccggctcttcggagatcaggatggtcaccgaggcaccctgcgggtcgtagtcctggcgggccacgttcaggatgttggcgccgatgatctcggcgacatcggtcaagatttgagtcagcctgtcggcgttgtactcttcatcgatgtattcaatgtaacgctgacgctcctcttcggtgcgcgcgtaacacacgtcatagatgttgaagctcagcgccttggtgaggttgttgaaaccctgcagcctcaggcgaggcaacggcttgaccacggcggtcgattcctgtgtaagaagggaaagggggaattatggggcaaactgcccccggggggaacgtgaagacgcaagagttctggcacactgtttgcccttaacaattgcgctggttaagctccgctatcgaccccgtgaatccgttcatgcgcagagggagcgcccctatcgtgtcaaccgtgcgcctagctagcagtccactggccctggatatcgccacaatcgatcgtttcctggcgcacagccacaggcggcgatatcccacccgtaccgacgtcttccgacccggtgacccggcgggaaccctgtattacgtcatcagcggctcggtttcgatcatggccgaggaagatgacgatcgcgagcttgtgctgggctacttcggtgccggcgagttcgtcggcgagatgggcctgttcgtcgaatcggaccgccgcgaggtgatcctgcggacccgtaccgcctgcgagctggctgaaatcagctacgagcgcctgcatcagctgttcctcggcccgctgtcggccgacgccccgcgcctgctgtacgcgctgggccagcagatctccaagcgcctgctcgacaccagccgcaaggccagccgcctggcattcctggacgttaccgaccggatcgtgcgcaccctgcacgacctggcgcaggaaccgggggcgatgagccatccgcagggcagccagctgcgcgtctcccgccaggagctggcacgcctggtcggctgctcgcgggaaatggccggccgcgtgctgaagaagctgcagaccgacggcctgctgcatgcccgtggcaagaccgtggtgctgtacggcacccgttgaccgttgagcacccggtgggtgcggaccttggtccgcactccttcgcgcgctaggctcggggcatggaactgagcagcgaattctggtggttcatcctcatcggcctgggcgcacagctggtcgacggcgcgctgggcatggcgttcggcctggtgtcttcgtcggtgatgctgagcatgggcctgcccccggcgcaggtcagcgccagcatccacaccgctgaagtgttcaccactggcgcctcgggtgtgtcgcacctcgcagccggaaatgtcgagaagcgcctgttcctgcgcctggccctgcctggcgcggtgggcggtgccgtgggcgcgtacgtgctcacgcagatcccgggcgagatcatccggccactgatctacctgtacctgctggtgctggcgatcatcatcctggcccgcgcggccggacgctggatgcccaagggcgagatccgccgggtaccggtgctgggcttcttcgcgggcctgctcgacgccagcggtggcggcggctgggggccgatcgccacgtccaccctgctcgcccggggtggccaggcgcgcaccacgatcggcacggtcaatgcggcggagttcgtggtcacgctgacggtgtcggcgaccttcctgctgtcgatgggggtgcagcacctgcagatcgtcgccggcctgctgatcggcggcatgatggccgcgccggtagcggccatcctggtcaagcgggtgaaggagcgctgggtgctggtggccgtcggcgtgctggtgctggggatcagcctgttccagattggccacgcggtgtacgggcacctgtaccgctgagcgtttgccggccagcggccggcactaccgggacagagaagcgccggcacaaccgcgacggagaggggtagtgccggccgctggccggcagatccatcaccgtgcggcgggatcaggccttgtcgccgccccggtccacgcaaccccagttgaggatgcgggtgcccgccggcagcacgcggcggaagaacgccacccggcccggcttcgggttcaccactaccggcgccttggctgccagcagcagcggcaggtcggcggtgctgtcggaataggcgatatcgatgtcgccgtagccgcgctcgcgcagcatgcgcatcttctcttcgttgtggcagtggcgggtcgggccgacgccgcccagccgtgggccgacctcggtgccgatcaccggtacgtcctggtgggccacgaaagccaggatcgcgcgcgccagctccggcggcgcacctgtggcaaccaccactcggtcacccttggcgcggtgcgcggcgaacacctccagcgcctgcggcagcagcttggcgcgcatctgcgcctggttgcgcagcacataggcgtcgatcaccttgttgaagtcacgcgcacggtgcaggccgaagctgccgatccacacatagaccgagatgcccgcgcgacgggtcggcagcatcgccaccatcggcccggcgatcggcgtgaccagcagcgccgccagcatgcgcagcgggttgcgcttgatcagcgaggcgaacaggtgggtgcccgaatcgccgtcgtacagggtgtggtcgaagtcgaagaccaccagcggcgcatcctcgcgcggcgttggatagtgcgttgtcatgccgcgaagaatagctgacgcaggccctcgcccggctcttccacgcgcatgaaggcttcgccgacgaggaaggcatggatgccggcgtcacgcatcagcgccacgtcctgcgggccaaggatgccgctctcggtgaccagcaggcggtcacgcggcaccgcgttctgcatctccagcgtggtctgcagcgacacttcgaacgtgcgcaggttgcggttgttgatgccgatcatcggcgccggcacctgcagcgcacgctccagctcgtcgatgtcgtgcacttccaccagcacgtccatgcccagcgacagcgccagttcggacagcgtggccagctgggtgtcgtccagcgcggcgacgatcagcaggatgcagtcggcgcccagcacgcgtgcctcgtacacctggtaggcgtcgatgacgaagtccttgcgcagcaccggcagcgtgcacgcctcgcgcgcctgctgcaggtaggcgtcggcgccctggaagaagtccacgtcggtcagcaccgacaggcagctggcgccgccgaactcgtagctgacggcgatgtcggccgggcggaagtccgggcggatgacgcccttggacgggctggccttcttcacctcggcgatcaccgctggatcgccgttggccaccgccgcctgcaaggcgcgcacaaagccacgtaccggcggggcgccggccacggcggcctgcagcgcctcgagcgggcgctgggcgcggcgctgggccacttcttcggccttgcgggccaggatcgtctgcaggatgtcgctcatcgtcttcggttcggtgcgggggcggtgaggacggccattatcggccatcgacggggtcaggctgaaccgcgcgctcaggcaaccagcgcgcgggtggtctcaacatactgctgcaggcgctggcgggcactgccgctggcgatggcggcacgggcgcgggccaggccgtcgccgatgtcgctggccacgccggcaacgtacagcgcggcgccggcattcaacgcaacgatgtccagcgccgggccgggctcattgtccagtaccgcgcgcagcatctggatggactgctccgggctgtccacgcgcaggttgcggctggccgacatggcgatgccgaagtcctccgggtggatctcgaactcgcgcaccttgccgtcgcgcagttcgcccaccagcgtgccggcacccagcgagatctcgtccatgttgtcgcggccccagaccaccatggcgcgctcggtgcccagctcgcgcagcacgcgggcctggatgcccaccagatcgggatggaacacgcccatcagcaccgacggcgcgctggccggattggtcagcgggccgaggatgttgaagatggtgcgcacgcccatctcgcggcgtaccggcgcaacgaccttcatcgacggatggtggatcggcgcgaacatgaaaccgatgccggtctgctcgatggcggcggccacctgatccggctgcagttcgatcaccgcgcccagcgcttccagcgcgtcggcactgccggacttggaagacacgctgcggttgccatgcttggccacgcgcgcgccggcggcggccgcgacgaacatcgcgcaggtggagatgttgaaggtgtgcgagccatcgccaccggtaccgacgatatcaaccaggttggaggtatcggccaccggcactggccgggcgaattcacgcatcacggtggccgccgcggcgatctcgtccacggtctccttcttcacgcgcagcccggtcaggatcgccgcggtcatcatcggcgagacgtcgccgcgcatgatctgccgcatcaggtcgaccatttcgtcgaagaagatttcgcggtgttcgatggtgcgatgcagggcttcctggggggagaagctcatgggaatgctccttggatcaggccgccggccgctgcaggaaattgcgcagcagggcgtggccgtgttcggtgaggatggattcgggatggaactgcacgccctccaccgggaactggcggtggcgcaggcccatgatctcttcgatcgagccgtcgtcgttctcggtccaggcagtcacttccaggcagtccggcagactgttcttgtccaccaccagcgagtggtagcgggtggcctggtagcggtccggcaggccggcgaacacgcccttgccttcatggcggatcggcgaggtcttgccgtgcatgatgttgccggcacggatgaccgtgccgccgtagacctggccgatgccctggtggcccaggcacacgccgaggatcggcgtggtcgggcccaggcgctggatcagctccagcgacacgcccgcttcgttgggcgtgcacgggccgggcgaaatgacaatgcgctcgggcttctgcgcggcgatctcgtccacgctcatcgcatcgttgcgcaccaccttcacctcggcgcccagcgtctgcaggtactgcacgaggttgtaggtgaagctgtcgtagttgtcgatcatccacaacatggtcaggttccgtcgcttatcaggaaaatggcgtacacgttttcggtgtaggtgatggggccggcttcaatggattcgggctcagcgggcgcgggcgcggaggcgggcgcgtagctgccggtcaccgagatcctgtcgaggtccccgccgtcctcgccctgctgcggccattgcccggcccggatgccgtaggcgaagtccggcgccacatcggagatgctgtacaggccacgcactcttgttccataggccttggccaggccctgcgcggactcgcgggtctgggccgctgcctcgcccttgagttcgcggcgcagcgccacttcgcccgaataggtcggcgccaggctgctcacctgtacgttctcgttggccttcaacgcccccagcacatcctgcatcgccttcacgctggcgaagctggcacgcagctggcgcgatacgcgggtaccgatgaagacctgccggttctgctcatagcgcgtggccgggccgatccgcaggttgtccgcacgcacgctgccctccaccgccttgtgctgcttgaacagtgccagcacgcgggcaacgttgtcctgcacgcggcggcgcgcggcgtcggcgtccatgtcggtctcttcgatgttcaactgcaggccgaaccggtccggcatcaccgtgcggctgccctgccccttcaccagcaggtgcggctgcgagggaatcgtgttggcctgcgcccacgcagacggggccatcgtggccagcagtgacgaccacagcaatgcgctcagcagcttcatgcggtactccttgtcttgaatgggaacagcggaaggtgccgcggcgcaggccacggcacggggaggatcacaggcccttggcggcctgggcgacggcgcggaacagcgcgcggcccttgttcatcgtctcgtcccattccttgtccgggtccgagtcgtagacgatgccggcaccggcctgcacgtacaggcggccatccttgatcaccgcggtgcggatcgcgatcgcggtatcggcatcgccgtgccagccgatgtagccgatgctgccggcgtagacattgcgcttgatcggttccagctcgcggatcacttccagcgcgcggatcttcggcgcgccgctgaccgtgccggccgggaaggtggcacgcagcacgtcggcatagctcaggcccggctgcagctgcccggtcacttcgctgacgatgtgcatcacgtggctgtagcgttcgatcacgaactgctcgcccacctccacggtacctgccttcgagacgcggccggcatcgttgcggcccaggtcgatcagcatcagatgctcggcgcgttccttcggatctgccagcagctcggcttccagcgccaggtccagctcgggcgtggcgccacgcgggcgggtgccggcgatcgggcgcacggtgacttcgccatcctgaaggcgtaccaggatttccggcgatgaaccgaccacctgcaggtcgccgacatccaggaagtacatgtacggcgacgggttcagtgcacgcagcgcgcggtacacgtccaccgggcgcgccttgaacggcacgctcaggcgctggctgagcaccacctggaagatgtcaccggcgcggatgtattccttgctgcgctggaccgcatcgacgaacccttcgcgggtgaaaccggagacgaagtcggactcgtccagcacgtcgctgttgagcggcgccggatagccggcacccggtgcacgcagcttggcagtcagtgcatccaggcgcgcctgggcctgctcgaaggcgccctcgacccgcgggtcggcgtgcacgatcaggtacagccggcccttgagattgtcgaacaccgccagctcgttggagtccagcagcaggatgtccggcgtgcccagctcatcgcggccggccggcggggccaggcgcggctcgatgtaaccgatgcactcgaaaccgaaccagccgaccaggccaccggtgaagcccggcaggccttccagcttcggcaccgagtgggcgctgcgcagcgcctcgacctcggcgaacgggtcggccacttcgcgggtgtccaccacctggccgtcttcgcgcacggtcagcgtgtggccatggaaggcgtacacgcgacgcgccggcaggccgatgatcgagtaacgaccaaagcgctcgccgccttcgacggattcaaacaggtaggtattggggccgtcggcgagcttcagatagaccgaaagcggcgtgtccaggtcggacagcacttcacggacgacgggaatatgggtgtggccttcagcggcctgctgctgaaactgagcgtgcgagttcaagacgactttccttccgggacacagcgttatgggggcggacgacggcaacgggccaccatcgccaccaacggcgtgcggaagaaagggtatgcggggtcgtcaggctggacaccccctgactgtatcgcagccggggcgggaggggaaccctggaaaactgaaccacgggacggccggggccggccacgggaaccaacgacgcggaccggtagagtcgactgttggtcgacttgcgcgcgtagcgcgggggtttacgccgtcggaacgaaaagcagtcgaccaacagtcgactttaccccctacccggccagcaacgggcatccggtcggcaggtgcatccgcaccctgcccggcacgcacgcgatgcggaactggcgggcctgcaccggttcgccgtccaggttgagggtcagcgccttcggtgcgtcgatctgcagccacggcagccgcgcgcgcgtggccagctgttcgagcgccgcctgggtgcccgacttcagcatctggccgagcgtggcggtgacctcaccttccagttccggaagcacggtgacatccagcagcccatcgtcgatcacggcctgcgggcacaactgctggccaccgccggcctgccggccattgccgatgcccagggcgatgaagtcgccttcccacgcgaaatccgggccggacagccgcgcggtgatcggctcgatgcggcccagcttggcgatgccggtgatcacataggccagcccgcccagcatcttcttcaggccggcatcggtctccaccgtcacctgcgtgccgaagccaccgctggcgaggttggcgcaccaccagggcgtgccatcggcatccacgcgcagcagatcgatggcacgcggcgtggtttgtccgatcaacgcaaacgcgccctcaggctcggtcggaatacccgcagccgtggcgaaatcgttggcggtccccatcgggatcagcgccagcgagggcagcgcatccgccgcttcctcacgatgcgccagggtttcggccaccgcgctgagcgtgccatcgccaccggcggcaacgatcacgtccacgccatgatcgatggcctcggccacgtagcgttcggcgtcaccgtcctcccaggtcacccgcacgtccagctgcacgccctgcccgcgccaatggccgacagcctcgcgcagttcctcgttgcctgcggatttgccattgaggatcaggcgccagcgcggggtggtcatgcggtacttccaggagggggtggcacaggctagcaatgcgctgtttgcccgcggtgaatgtcacgcaggtgtcattcagttgctggagaatggaaggccatagcagggacgatggatggaggcaggatcagcctcccacgcatgcagcgaggccacgccagtgattggcgtggctttttttttggggggggtacgcagggagtgcgaaccaaggttcgcacccaccgggttgcggtacgcagccaccacacgcctcacccgttggcgaaatcgtgcagcgcctggccctgcaaccggtagacggtccactcgtcctgcggtttggcaccggcagcggtgtagaactcgatggccggggtgttccagtccaacaccgaccattcgaaacggccgcagccctcggccacggcctggcgcgcgatgtacttcagcagtgccttgccggcgcccgcaccgcgcttttcctggctgacgtagaggtcttccaggtagatgcccttgcggcccagccaggtggaatagttgtagaaatacaccgcatagccgatggcctcgccgtcggcttcgcagatcagtgcgcgtgccgtggcatcgggaccaaacaggctctcggcgatgccgatctcatcggtctgcaccgaatgctcggccttctcgtagatggccagctcgcggatgaaatgcaggatcagtcccgcatcggcgacggtggccgggcggatgttcaacacggccaccgtactcatggctcagccccgtgccgcagcgacgttggcgcgcatctgcgcgatcacatcctggtagctggtcctggcgttgaagatggccgaaccggcgacgaaggtgtcggcgccggcagcggcgatctcgccgatgttgtcggccttcacgccgccatcgatctccaggcggatgtccttgccgctggcatcgatcatcttgcgcaccacgcgcagcttgtccagcgccgaggggatgaaggcctggccgccgaagcccgggttgaccgacatcagcagcaccaggtccaggtcatccagcacccagtcgaggatgtccaccggagtggccggattgagcacgatgcccggcttgcagcccagcgagcggatcagctggatggtgcggtgcacgtggcggctcgcctccgggtggaagctgatgtaggtggcaccggcctcggcgaagtccgggatgatgcgatccaccggctcgaccatcaggtgcacgtcgatcggcgcggtgacgccgtgcttgcgcagcgcctggcagaccatcgggccgatggtcaggttcggcacgtagtggttgtccatcacgtcgaagtggacccagtccgcgccagcggcgaggacgttgtcgacttcctcgccgaggcgggcgaagttggcggacaggatggagggggcgatgaggcagttggacatggccggggccttcggaacggggaaaaggttctcccgcccgcaggcgggactctggaatcagcgcttgcgcagggtcttgatgcggtcgtaggcggcattgatccgccgcgacttctgctcggcctgctgctgcagctcgggggcggcaccgcccagcttgtcggggtggtactgcgagatcagcttgcggtaggcgcgctcgacctcggcatcggtggcctcggaggtcagcccaagctcccggtacgggttctccttgttcaggcggaaccagtccgaatcgaaggcgtggccgatcaacaggccgaccaccgcgccgaacagcggattgggccggaacagcagggcgccggcgatgaatccgagcagttttccgtaccagcgcatggcgctccggggtcgaccgacgaaatggacgctcattttacgtcacagcgggcccggaccgctttacactaggccgcccgctggtcagcgggcccgccgggtccgttgggcagcagccgtatcgacaacgccccaggagtgcccgtgccaaccacgctgttgcaatccgatctccccggcctgcccttgcgccatcgcggcaaggtgcgtgatgtgttcgatatcccgcgcgagcggctgccagccggaaccccgccgggcgagtacctgctgatggtcgccaccgatcgcctgtcggcgttcgacgtggtcctgcctgacccgattccgggcaagggcgagatgctctgccaggtctccaacttctggttcgccaagaccgcgcacctgatgcccaaccacctgaccggcatcgacgtggccagcgtgctgcccgaaggcgtggacccagccctgtacgccaagcgtgcggtagtcacccgcaagctgaagccggtgccggtggaagcgatcgcccgcggctacctgatcggcagcggctggaaggactaccagcgcaccggcaaggtcagcggcatcgacctgcccgacggcctgcgccaggccgagcagctgccggagccgatcttcaccccctcgaccaaggccgcggtcggcgaccatgacgagaacatcgatttcgatgcgatggtgaagcaggtcggtgcggaactggccgagcgcgtgcgcgacgccaccctgcgcatctacaagttcgcggccgattacgcccgcgagcgcggcatcatcctggccgataccaagttcgagttcggtaccgacgccgatggccgcctgtacatcatggacgagatgctgacgccggattcctcccgttactggccggccgacgaatacgaagtgggcaccagcccgccgagctacgacaagcagttcgtgcgcgattacctggagacgctggactggggcaagaccgccccgggcccgagcatcccggccgagatcatcgaacgcacccgcgccaagtacgccgaggcgctgcagcgcctggccgggatcagcgtcgactgatccccccgcgtccccccggccggaaaggcggggggcgctctgatcgcggtagtgccggccgctggccggcaacctcgcgaactcggctatgctctggagtgccggccagcggccggcactaccgttgcccgaggaagcgacgcagcatgcagacatccacccagcttgcgcggccgatcgaccgctatttcgccagctactccgacgaccaccgcaatgtgatcaaccagcgcatccacgtggtggcggtcccggcgatcctgtggtcggtggtggccctgctgtggtgcctgccgccgctgatcacctggttccagtacggcatctggtcggcgttggcgatgttcagcgcgtggtgcttctacaacaagttgtcgcgcccgctgggcatcggcatgctcatccagttcttcgtgttcggctgcctgtgccggctgctggaggccgagatcggcctgcaggccctgcgctggctggcggtgggcgtgttcgtggtggcctggatcgcgcagttcatcggccacaaattcgagggccgcaagcccagcttcctgaccgacctgacctacctgctgatcggcccggcctgggtgatggccaagttctaccgcaagctggactggcgctactgacctggcggcggccgacagcggccgtcgtttcctgaacgggcggattccgtcacccgtagtccacgggagccctgccagcctgcgccggtgatccgctccccactgcccgcccgtcgacggcagcccctgtgcgacagggcctgcggtctccccgcgtgggcgtagggtgtcccccgagggcagccagggaagggatgcaggaatgtgatgttgcatcgcagaaaaaatgaatcagcgaacgttacatgcaattgatcgctgttcgatgggtttcggcgacatttcgcagcctgttatcctccctgacctgctcgtgaatcatggattccctgcatgctccccagcctgcccctgctgctggccctgccgttcctgatggcagcggctgttgcggccttcccccgtagttcgcgctcgactgctgcctggctggcggcgctggcgccgttgggcgggctggccatcctcggctggctgaccccgtcggtgctcgatggccaggtggtccgcaccctggtgccctggctgccgcagctcgggctggacttcaccctgcgactggacgggctggcctggatgttcgccgggctggtgctcggcatcggcgcgctggtggtgctgtatgcgcgctactacctgagccagcaggacaacgcgcaccgcttctactgctacctgctgctgttcatgggcgccatgctgggcatggtgctgtcgggcaacctgctgttgctgatgatcttctgggaaatgaccagcatcagttcgttcctgctgatcggcttctggtcgcaccgccaggacgcccgcgaaggcgcacgcatggcgctggtgatcaccggtggcggtggcctggccctgctcggtggcgtgctgctgatcggccgcatcgtcggcagcttcgacctggacgtggtgctggccgctggcgagcagatccgcgccagcgcgctgtacccctacgccctgttcctggtactggccggcatcttcaccaagagcgcgcagttcccgttccacttctggctgccgcacgcgatggcggcgccgaccccggtctcggcctacctgcactcggccaccatggtaaaggccggcgtgttcctgctggcgcgcctgcatccggcactggccggcagcgacctgttcttctacacggtcagcggcatcggcgcactgaccctgctgatcggcgcctggaatgcgatcttccagcatgacctgaagggcctgctggcgtactcgaccatttcccacctgggcctgatcaccctgctgttcggcctgtccacgccgatggcggtggtggccggcgtgttccacatcctcaaccacgccaccttcaaggcctcgctgttcatggccgccggcatcatcgaccacgagaccggtacccgagacatgcgcaagctgggaggcctgcgcaggctgatgccgttcaccagcgcgctggcgatcatcgcctcgctggcgatggctggcatccccctgctcaatggcttcctgtccaaggaaatgctgttcgccgaagcgatcacggccggcggcccgggaatcatgcgcacggcggtgtcgatcgcagcgttgctggcgggcgtattcggggtggcgtacagcctgcgcttcgtgcacgacaccttcttcggccccggcccgcacgacctggaccgcgtgccccacgaaccgccgcgctggatgaaggtgccggtggaactgctggtggtgatctgcgtggcggtgggcgtggcaccggcactgaccgtagcgccggtgctgcacgccgctgcggcctcgatcctcggcgacgccatgcccgagtacagcctggcggtatggcacggcttcaacctgccgctggcgatgagcgcgatcggcgtgatcggcggcgtggcgctgtacttcggcctgcgcaagctgatcaacctgcacgccgtgaccaacgtcagcactggccgcaatgtgttccatgcgcagctggacgcgatctccgcactggccatgcgcctgaccaacggcatcgccaacggcagccttcagcgcatgctgctgggcctggtgctggtggcgatcgtggccgccgccgcgccgttcgtggccaaccccgcctcgccgaactggaccaggccacagccgatcccgctgctgggctgggcgctgtggctggtgatgatggcctgcgcggtggctaccctgcgtatctacaagcagcgcctgctggcggtgctgctggtcggcggcgtcggcctgatggtggcgctgaccttcgtgttcctgtccgcgccggacctggccctgacccagctgctggtggagatggtgaccctggtgctgatgctgctgggcatgaactacctgcctgcgcagtccgggccggagcggccgcgctggcgcaagcgccgtgacgcggtgatcgcgatcatcgccggtgctggacttggcgccttggcctattccgcgatgaccctgccgccgaacaccatggccggcgagctgcttgcccgtgccctgcccgaggcctatggccagaacgtggtcaacgtgatcctggtcgacttccgcggcttcgataccttcggcgagatcaccgtgttcggcatcgccgcgctggtggtgcatgccctgctgcggcgcacgcggatggcgccggagcagatcatgcccggcccgccgatcaagctgccggtgccggccgacctggcccagatcatgttcccgctgaccctgaccgtgtcgatcttcctgttcctgcgcggccacaacgcgccgggtggcggcttcatcgccggcctggtgctggcggtgccgctgctgatccagtacgtgatccagggcactgcgtcggtggagtcgcgcttcggcttcgactacatccgctgcatcggcatgggcctgctgatcgccctgctcagcggcagcgcgtcgatgctgttcggcgtgccgttcctgaccagcggccacctcgacctgcacctgccgctgatcggcgacgtgccgctggccagtgcgattggttttgacatcggcgtctatctggtggtgttcggcggtgccatgctgatgctgtcgatgatgggcacgatcaagccatcgcgtacccgtaccgcccgcaagggtgagatcgacctgcaacgccgctcggcacgcaccggggagatgcactgatggaactggccctggctaccgcgatcggcgtgctgaccgccatcggcatctacctgctgctgcgtgcgcgcagcttcgatgtgatcctcggcatgaccttcctgtcctatgcgaccaacctgctgatcttcgccggtggccgcgtggtgctgggcaaggcgccggtactgcaggacggcgtggacagccacctgggcaactacaccgacccgctgccgcaggcgctggtgttgaccgcgatcgtgatcgccttcgcgatgaccgcagtgagcatcgtgctggccatgcgcagccgcagcgacaaccacagcgaccatgtggacgcccacgagccggatgacgacctgcaggatgagcgcgtaccagcacggcagggcgaggaccgcgcatgaaccacctggtcattctgccgatcctgattccgctgctgggtgcggcactgtcgctgttcgtcgaacaccgccgctatggccccagggtgcagcgcgcggtggcctggaccgtgctgtcggcgctggcgctggcggtgggcctgctgttcgcgtcgaccgcgggcggtgatatcaacgtctacctgctgggcgactggccgtcgcggctgggcatcgcgctggtggccgaccggctgtcggcatggatgctgctgaccaccctgctgctggccattccctgcctgctgcacgcctgctcgggctgggaccgccgcgcaccgcacttccatgcgctgttccagttccagctggtcggcctcaacggtgcgttcctgaccggcgacatcttcaacctgttcgtgttcttcgaggtgatgctgatcgcctcctacggcctgctgctcagtggtggccgtggcctgcgcatgcgcatcggcctgcactacgtggtgttcaacgtcaccgcctcgaccctgttcctgatcgctctgggcctgctgtacgccacgctgggttcgctgaacatggccgagctgtcgcagcgcatcgccgaggtaccgccggcgcagctgaccctggtgaaggcgacgatgggcctgttgctgctggtgttctgcgccaaggccgccctgatgccgctgtacctgtggctgccggaagcctattcacgcgcaccggcggcggtggctgcgctgttcgcgatcatgaccaaggtcggcctgtactcggtgctgcgcatccagatgctgtggttcggcgacgatgccggcgcgatggccggctacggccgtgactggctgctgtgggccggtgtggcgacgctggtgctgggcggcctgggcgccctcgccgcgacccgcctgcgcgtgctgatctcctacctggtgatcgtgtcggcagccacgctgttcatcgccttctcggtgggcacgccgcaggtgctgtcggccggcctgtactacctgccgcacagcagcttcgtcgccgccgcgctgttcctgatcgccgacctgatccgccgtcgtcgcggcggtgccagcgaccgcaaggaagtggtcgcgccgatgccgggcaaggagacacccgccgtgctgttcctgatcggcgcggtgtcggtggccggcctgccgccgctgtccggtttcctggccaaggccgcactgctggccggcatgccggcgcagtacaccgctccggtctggaccgcggtgctggtcagcagcctgctggtgatcatgggcctgacccgcggcggcatccgcctgttctggcgcgtgccgcctgtcgatccggaggcaccgaagccccgcaaggctcctctgcgccgggtggagctgtacgccgcgtgcatcctgctggcctacggtatcgccatgaccctggccgctgcaccgttgatgcgctacaccgacgccaccgccgcacagctgctgcaacccagcgagtacgtgcagcacctgcgcgcgaccgcaccggagatccgccagccatgaccgcccagcgctccctgttccgtcgcctgattccctcgccaatgctcagcatcatggtggtggcgttctggctgctgatgtccgacagcttcaccctcggccagatcgtgctggggctggtgctgggcgtggtggtgccgctgttcgccgcacgcctggaccgcgagttcgcgcgcatcggcacgttgcggccgctgcccaagctggtgtgcgtgaccctgtgggacatcctgatgtccaacatccgcgtggccctgcaggtgctgggcccggagaggaagattcaccccggtttcatctggctgccgctggacatcgccaacatccacggcatcgcggcgctgaccagcatgatcacgctgaccccgggcacggtctcggccgcgctcagcgacgaccgcaagttcctgctggtgcacgtgctgcacctggaggacccacaggacctgatcgatacgatcaagcgccgctacgaggcgccgttgatggagatcttcccatgactggattccagatcatccagaccacgctggtggtgtgcatgcacgtggtcggcctggccatgctgctggccacctggcgcctgctgcgcggaccgaccgtgcccgaccgcatcctcgcactggacacgttgtcggtgaccgccattgccgagctgatgctgttcggcatgtacctcaactccgcgatctacttcgaagccgcactggtcatcgccatgctcggcttcggcagcaccgtggtgctgagcaagttcgtgctgcgccgggacatcgtcgaatgatcaccgcgatccagatcggcctgtcgatcctgctgctgttcggctgcttcttcatcctggtcggcgcactggggctggtgaagctgtccacgttcttcaagcgcctgcacgcgccgaccaaggccagcacgctgggcgtgggctgcgtgctggtgtgctcggtctgctaccacatcttcctgggccaggacccgcagccgcgcgagctgctgatcaccgtattcctgttcatcaccgcgccgatcagcgcccacatgatggccaaggcggcgctgtcgctgctgatggaaacccgtcccagcctgccgggcaacgagccggctgccgaggaacagcttccgccgccggagccggcgcgggaagaggaagccacgcagaaccggtagtgccggccgctggccggcagtggcaagggttccgtcagaggcagtgaggttgccggccagcggccggaactacctcatgccgcgccgaccagcagcagctccagcacgaaccagccggcgaacgcgaccagcaggattccgccctcactgcggctgatcttcagatcgccacgcagcatcgggtacagcaccagggcgaacgccagcagtgccggcagttccaggcgcacgaacgaggccggcaacgccaacggctgcaacaccgccatcgccccgatcaccagcagcaggttgaccacgctggagcccagcacgtggccaagcaccatgtcgccgtggccgcgacgcgcggcagcaattgcggttgccacctccggcagtgcggtgccgatcgccaccggcagcaggccgaccagcagcggtgtccagcccagcgcggcaccgaagtcagcggcggcgcccacgaccaggcgcgcgccccagtacagcgtcagcgctgcgatcagcacccgcagcacgttcaacggcaggctggtgcggctcagggcggactcggcgatggccgcctgcacctcggcacgctcaacgcggccgcggcgcagcagcagcacctgcatgacgatgaagcctgccaccagcacgccgccttcccagcgcgccaggcgaccatccagcccgaacaggaccagcagcacgccggccaccagcagcgaccaccacagcaccgtctgcaggcgcgcgcgcagcaacaggggcgcggcgatggctgccaccgccagggtgaagcccaggttgacgatgctgctgcccacggcattgcccagtgccagctccggttggccgaccgccagcgcgcgcgcattgaccgccagttccggcaacgaggtggtcaccccgagcagcagcagcccggcagtgaacgggctggccccgaagcgctgggccaggccggacacggccttgacgatggaatccccgcccagcgccagcaacagcaggccgagcaggaaccaggcaatggcaatggcgatcatcgagcactccccagcagtggtggcgcgattctacgcttggcccgagcgcatggctgggcggtggatcaaggatcagccacagccttcggcgtaatcgacctgcggggtctggccgacgcgccaggcgctgacccgaccatcggcgccgagcgcgaagtcgatgaccgccccgccttcctgcgccggccgcacgcgcaggtgctgcgctttctcgtcgtacttgtcacgaccgacgtccgcgcgctctgggtacagcacctgcagctcgcccagggtcatgccgaccttgccgccgcccggggcgacgatcgccgcactgcgcacgtcatagcgcaccagcttgcgtgcctcgatcatcaggcgagggtcttcggcgccctgcggacgcaggaagtagcagccgtcgttgctgtcgtcggccggcaggggcttgccattggcgtcggtgcccagtccctgcagcggcgtgccgaagccgctgcggacctcggcgatgccggcgcccagcgttgcaccgccgaagccgtccaggcgcgccggactgtccttgcggaggtcgttggccgggcgggcggccaggtcgggatccgccgactgcgcgggcccggtcgccgaggcggtttcggccggggtgtcgctgccactgccggccgccccctgcttgtcggggccagcactgcaggcggtgagcgaaaggagcaacagaccagcaagcggaaggtgcttcatcggtgcggttccctggcacgaagatggctgcacgctagcccatcccgtgtgcaggcgctgcattgtcatcgcggtttcatcgccttcgttcaggctcggcgtgcaccgacttggctgtcccttccatgcaaccgcgcaagaccgaactcgcccgaaccgcgctgcaggcccatcgcgcgccgctggacatgcgccagcggcggctgctgatcctgtgcgacggccagcgcagcatcgccgacctgaccggcctgctcggccaggacgcgcccgccatggtcatccagctggtgcaggccggctacctgagcaccggtaccggcgccacagccgcaccgccaccacccgcagacgcggcagcaccggcacccgccacgccggctgcggcaccggctgcacccgcaaccggcagcgagcgccgccgctcgctggtggccgcgcgcatctatgtactgggcatcctggaaatgcagcgccacccgcaggcggcggcgctgttccgcgacctgcagcaggcgcgcgccgaaagtgaagtactgcaggtgctgcactcggcgatgcagatgctgcccgggctgacctcggagggttattgccagcgtgtgcggcaacgcctgctggaagcgctgccgctggagcattgcgacgcgttcaccgaggccgcctgaagaaaaaggggacggaggggattaagtcgtttcaggcacacgtgtgctgattgcggcttaatcccctccgtcccctttttcgggtcagcggtagttgttgcgcaggccgttccagcactgctggtaatcgccctggcgatggccggcggccagcgcctgcgcggtcggacggatcaccgcgcgggtctcgaacatgaaggccatcgtgtccttgatcacatcggccttggacagatcggcattggaggccttgtcgaaggtcggcgcatccgggccatgaccgctcatgcagttgtgcagcgatgcgccacccggcacgaagccttcggccttggcgtcgtaggcgccatgcaccaggcccatgaactcgctggcgatgttgcggtggaaccacggcgggcggaacgtgttctgcgccaccagccagcgcggcgggaagatcgcgaagtccatgttgctggtgccgggtgtgtcgctgggcgaatgcagcaccaggaagatcgacgggtccggatggtcgtagctgatcgaaccgatggcgttgaagcgacgcaggtcgtagcggtatggcgcgtaattgccgtgccaggccaccacgtccagcggcgaatggtcgatcggcgcgcgccacaggcggccctcgaacttggcgatcagttcgaaatcgccatcgacatcctcgaacgccgcgtgcggggtctcgaagtcacgcgggttggccaggccgttggaaccgatcgggccaaggtcgggcagcttcagcagcgcgccgtagttctcgcagatgtagccgcggctcgggccatcgggaagttccacgcggaaccgcacgccgcgcgggatcaccgcgatctgctgcggctcgatctcgatcacgcccagctcggtcagcaggcgcagtgcgcccagctgcggcacgatcagcagttcaccgtcggcgtcgtagaagtagcgaccgaccatgtcgcggttggcagcgtaaaggtggatgcccacgccggcatgcgcgtcgggcgagccgttgccacccatcgtgtacaggccttcgacaaagtcggtcggcagctccggcagcggcagcgggctccagcgcagctggttcggtgaagccggctgtgcgccgaaatcacactgcagctgcgactgcgcgaacggagtgaactcgccatgggtcacggccgggcggatccggtacagccagctgcggcgattgctgccgcgcggcgcggtgaaggcggtgccggtcagctgttcggcgtacaggccgtgggccaccttctgcggtgagttctgcccgaccggcagcgcgccggcgacggcctcggtggcgaattcgttgccgaagccggactggtagccgcgggcggtgatggcgggggacatgggaactccagagattgccggccagcggccggcactaccattcggacaggcaatgccggcgggacgccgacattgcctgcggaccttacagcacgccgcggcggatctggtcgcgctcgatgctttcaaacagcgcggtgaagttgccttcgccgaagccttcgttgcccttgcgctggatgatctcgaagaagatcgggccaatgcagttctgggtgaagatctgcagcagcttgcgctggtgggtttccggatcggcgtcgatcaggatcttgttcctggccaggcgcgccacgtcttcaccgtggttcggcacgcgctggtcgatcacgtcgaaataggtttccggcgtgtcgaggaaatccacgccctgcgcgcgcatcgcttcgacggtctcgtagatgttctcggtgaagcaggcgatgtgctggatgccctcgcccttgtacgcgtccaggtactcgttgatctggctcttcgggtcggacgattcgttcagcgggatgcgcacgatgccgtccggtgcggtcatcgccttggacaccaggccggtcttcaggcccttgatgtcgaagtagcggatctcgcggaagttgaacaggcgctcgtagtagtccgaccactgctgcatgttgccgaagtacaggttgtgggtcaggtggtcgatgaaggtcaggccgaagccgaacgggtgcaggtcggcccctgcgatcggctcgtagtcgccgtcgtagatgctgccggcgctgccatagcggtcgaccaagtacagcatgcagtcgccgatgcccttgatgaccggcgcgctgaccgccttgctgtccggcttgaaggcgatggcttcggcgccgttgcccagcgcggtctggtagacctcctggcccggcttcttgaagcggatggcgaagccacaggcgcacgggccgtgcttttcggcgaagtcggcggcgaacgaatcggggtcttcgttgaccaggaagttgacgtcgccctggcgatagacggtaatcggacgctgcttgtgcttgagcaccgcgctgaagcccatcttccggaagtactcgtgcagctcctggccacggccggccggggcggcgaattcgacgaactcgaagccgtcgatgcccatcgggttctcgaaggtggtgacctgcatgccggggttgggatgcgaggcggtcgggactgcggtattcatggcgtggctccgaatcggtaccgcatcggtacaaaccaggtgcgggcaggtagggacccggcgagaatgcagggtctggacccaccccttatagttacacttgaaaccaccagcaaggtgcaccgcaacatgagccccgccgatcccgtttcgacccgcctgcgtgcctcgcacgtcctgctcgacctggaacagttcctgccgtaccggctgagcgtgctgtccaaccgggtcagcggcaacatcgccaagctgtacggcgatcgttacggtctggcgatccccgagtggcgggtcatcaccatcctggcgctgtacccgggctcctcggccagcgaggtctccgaccgcacggcgatggacaaggtggcggtcagccgcgccgtggcccgcctgctggagcgcggcttcatcaagcgcgagacccacggcgacgatcgccgccgctcggtgctggcgctgtcggccgccggtttcgaggtgtacgagaccatcgcgccgatggtgatcgagatcacccgcaagctgatgtcggtgctgagcgaagaggaagagcaggtgctggaaaagctgatcctgcgcctggccggcgaaggcctggagcggatgggcgaaggcgtctgaaagaaaaggggacggaggggattaagtcgcatcaggcacacctgtgctgattgcggcttaatcccctccgtccccttttttcagctgaggtgcttgcggcgtgcgtggatccacggcacggccagtgctgcgatggcgccgccggcgaagcccagcgaggcggccaccgtcgctgcttcgaccgcccccggcagcgccagcgccgccgccaccagcagcaacgacggcaggccgacgaaggtgcccaggaagaagtgccagcgcggtgaccaggtgttgagctgcagcaggctgaccggctgccaggcgtcagaggcggcgtcctcggcgatcttcgccacggccttggccaggtccacttccggcagcgcgcgccccaggcgggcggtcgccagcagctcggccaccgcttccaccggcgggaagctggacggccacgcaaccggcgccggcacgccgtaggcggtcagcagcggcacgctcaaccacggcgccaccagcgggcgcatgcggcggcgcccgtgcacgcaccagatctgcggctggccgtgcgcagtgacgctgtacagcgccagttcgttggccggcggatagccgagcatggtcacccgcgcggccaggctgtcctggcccatcgcgcgcaggaagccggggcggctgcgaccttcctgcatccacgccaggcccagtgcgcccaccagatatgcctcggcgacgtccttgctgccggccgtggcgcgctcgtcactggccagataccacgccagtgatttcggttcggccacatcgtccaggccccagcggctgtcgtcacccaacacatggcgcaccggcagtcgcgcgggggcggtctcgccacgctcgccggtctgcaggaagggcagcacgccctggatgaaggtggacagctcgatcgcgcgcgcgccgtggccctgccattcgggcggcagcagcccggccagctggccttcggcggccagcgcatcaagccgggacttctgctcgaccagcttctgcaccgcccccttcagcaccacgttgtcgggcagcgcgatctgcggcaggcgatggcgtggcggcgccaggtcgacgctgtcctctccggtaccggcgtcatccagcagcgcttcctgcggcggcagggtcacgccctcgcctgccccaccctcggccaggtcgctggcgggttcgggcaatcgttcggcgtggtcgctgtgcatgggcgttccggaaggttgcatcgacgggatgtcgactgaggtccttgccggtaacggcgtgctcacggtgaagttgagacgccgattcagagagtgtgacggtgcgcgcagtagatccgcgccaggcgtggatgcgcctcagtgccgaccaacggtcggcacccaccggggtgggcggtcagcggtcggcacccaccagagcatgccggccagcggccggcactaccctattccggtttgtcaggcgcccactgcttgaggaaggcactcacccgcgcaggctggaacgcctcgcccctgcgcagctcgccggtggcctgcgataccagcaggccgccatctgcatcgagcaccagcaggtacgggtagtcgcgcgccatcaccgggtactgggcgaagaaggcggtgttgggctgctcgtcgctggcgttgaccttcacccacacgtagtgggcatcgcggaagcgacgcaggtcgccgttgccttccaccacgtcgtccagcgcccggcagcgctcacaggcggcgttgccgacctccagcaggatccgcttcttgccacgctgggcttccaccttggcggttgccaggtcgtcggcggggttgcgggccgggtcgaactgcgcgccgagcccggcgatggcggcgatgtccgccgccaccggggtgttgcccgaggccaccggttcgctggggtcagcaaccggtggctcggtgggtcgggtatccaggggctgcgtgggctcggcggcggcaggcggttgcggttgcgaacaggcgccgatcagcgccgcacagaccaccaccattgcaccaccgagcttgctgcgcatgccttctaccctctcatcattacttgacgccgtgcatcagcttgttgatcagcggggcgatcaggaacagcaccacgccggagccgatcagggcccagaacccgaaggtataccccttcagggccgactcgaccgtcatgccgccttcaccactgaccacgccggcgaagatgcccgacaggttgttgccgatgccggtggacaggaaccagccacccatgccgaagccgaccaggcgcaccggggccagcttggtcaccatcgacaggccgatcggcgacaggcacagctcacccaccgactggatgacgtagaccatgaacagggtccagaacgggatcttgccgtcaacgaccatctgcgacagggcgaacatcagcagggcgaaggcggcgccgttgaacagcaggcccaggccgaacttgcgcgggatggacggattggcgcggcccatggccacccagatccaggcaatgaccggggccagggtgatgatcgccaccgagttgaccgactggaaccacgcggtcgggaaggtccagtcaccgaactggcggttgacgatgttctcggccaggaaggtgaacgagctgccggcctgttcgaagaacatccagaacatcacgttgaaggcgaagatgatcagcatggcgatcacgcggtcgcgctgcaccttgccttcgcggacgccctcgaccagcagcaggatggccagcgcggtgaacatcgcacccaggatccaggccagcgcggtggcgccggtagccagcaggaagtacgccaccgggatggcgaccacggcaccggccagcaccatgatgatgcggccgaagccttcagcgccggccggcggtgcaccgatgcccttcaggccggcgcgaccgatgtagaaccacaccagcgagatcagcatgcccacgcccgaggcaatgaacacgaccttgtaggacggcatcgcgtcggtaccgaacaccttgcgggccaggtactcggtcagcaccggggcgatcatcgcgccgatgttgatgcccatgtagaagatggtgaagccggagtcgcggcgctcgtccttcaggccgtacagcttgccgaccatggtcgagatgttgggcttgaacaggccgttgcctacgatgatcgtggccaggccaagcttgaagatgtgctcctgcggcagcgagatcatgaacaggccggcggccatgatgatcgcgccggtcaggatcgagcgctggtagcccagtacccggtcggccacgtagccaccgaagatcgccgcggcgtataccagggccaggtaggcgccatagatgcggctggcgtcgccttcaccggcagcgctgccgttgtagaactgggcgacgatgtacagcaccaacgcccagcggatgccgtagaacgcaaagcgctcccagaactcggtcatgaacagcatccacaacgggcgcgggtggcccagcgtggtcttgaagtccggcagcgccggctctggggtgttcgcagtggcgtttacgctcatgcggatttcctggttcggtggatgacgagcacgtccgctgtgcagttggagcaacgcgcgaggatcaccgacttctgccgttcacgtcaaatacacgccgtttgaggcaggtgccagcctgctcgctgaacttgcatctgaaacgatccagccaatggccggggtccaagctgaatgggggtcagcccagttctgccgggggtgccgcctgcaggctggtgcgcacctggaacagttcggggaagaaggtcagctccagcgccttggcgaggaagcccacgccggacgagccgccggtgccgcgcttgaagccgatcacgcgcatcaccgtgcgcatgtgtcggaatcgccacagctggaaggcggtctccaagtccaccaggtcctcgcacagcgcgtactcgcgccagtagcggtcggtgtcctggtagatgcgctcgaagaccggctgcagcgcgtcgtcggccacatgcggctgggtccagtcgtgggattcgtacaccgccggcacggcatggccgaagcgggccaggtacttcaggaattcctcgtacaggctcggcgcctccagcacgatgcgcagctgcgcctgcccggccgggtcgtgctcgaacacctgcagcatctgcgcgttcttgttgcccagcaggaactcgatgtagcggtactgcagcgactggaagcccgaagacgggcccagcacgtcgcggaaacccatgtattcggacggggtcagcgtttccagcaccgaccactgctcggtcagctggcgcagcacctgcttgctgcgcgccagcaccttgcggcactgccagacttcatcgcgctgcaggaagccgatcgccgcacgcagttcgtggccgagcagcttcagccacagctccgaggtctggtgctggatgatgaagagcatctcatcgtggtgcggcgggttggacagcggctgctgcgcgctgagcagctggtccagccgcaggtagccgccgtaggtcaggcgtccctgcaggtcggtgtggatgccggcttcgagatcgcgttggttgttgtcgacagacatgggcgggaccagatcgggggcggcaagggtagcgcgttgccgccgcgctggcagccgccgggtccataccggggcgtgcggtgccccgtggagcattggccgatgcggggcctgcgcgtggaaccgatcgggtcgttgcgccagcagtcagccagaggcgtattctgatgctttgcagcaacgactgaatacgttgttgttattggccccccacccgccggcaggggtaaaacagggcgttgccgtgttgcggcgcaggaaggctattccgtacgcgttccttaacatggcgattcatatcatttgtaacttctctgtcgaaggtgcagtacgcaatgacggttgccgctgaattcaagatcgaatacctgcagtacctggatacggacggcaaactcgtccgcgatgacctgcccgcgtcgctgcgcgaccccaaggtcctggtaccgctgttcaagcagatgctgttcgtacgtacgttcgacagcaaatccatcgcactgcagcgcaccggcaagctgggcacctatgccgcctgcctgggccacgaagccgcgcacgtgggtatcggcgcggcgatgcagaaggacgacgtgttcgcgccttcgtaccgcgagtatggcgcgatgttcatgcgtggcgtgcgcccgcacgacgtgctgatgtactggggcggcgacgaacgcggcaacgattacggcggcaacgcggccaaggacttcccgttctgcgtgccgatctccacccagtgcctgcatgccgcaggcgccgcgctgaagttcaagctcaacaaggaaccgcagatcgccgtggcggtgtgcggcgacggcggcagctccaagaccgacttctacgcggcactgaattcggccggcgcctacaagctcccgctgatcctgtgcatcgtcaacaacggctgggccatctcggtcccgcgttcggcccagaccggtgccgaaacgctggcgcagaagggcctggctggcggcctgcactgcctgcaggtggacggcaacgacctgattgccgtgctggctgccatggagcaggcgcgcgaacgtgcgctggccggcgacggtggcaccgtgctggaactgatgacttaccgcctgtccgaccacaccaccgccgatgacgcgcgccgctaccgcgacgatgctgaagtgaaggatgcctggcagcgcgagccgatgctgcgcctgcgcaagtacctgatcaacgccggtgtgtggagcgaggatgaggaaagcgcctgggtcgccgagtgcggcaagcgcgtggacgaggaagtgaacctgtacctcaacacgccggtgcagccggtcgaggcgatgttcgacttcctgtatgccgatccgccgccggacctgctggcccagcgtgcccaggcgatcgccctggagaagcgccatggatgagatcaagaacggcgcgcccggcgcgcacaccaacgccgccgacagcgccgctgtcgcgcgcggagatgacagcatgaccaccaccccgatcaccctcatcgaagccatcacccaggcgctggcctgggagctggaacacgacccgtcggtgctggtgctgggcgaagacgtgggcgtcaacggcggcgtgttccgcgccaccgccgggctgcagcagcgcttcggctcggaccgcatcctcgataccccgctggacgaaaccaccatcgccggcctgaccatcggcctggccgcacagggcatgaagccggtggccgaagcccagttcgacggcttcatgtacccgatggtcgaccatatcgtctgccacgccgcacgcctgcgttaccgcacgcgtggccgcctgcactgcccgatggtgctgcgcgtgccgtggggcggtggcatccgcgcgccggaacaccacagcgaagccaacgaggcgatcttcaccaacgtgccgggcctgcgcgtggtgctgccgtcgtcgccgcagcgcgcctacggcctgctgctggccgcgatccgcgagccggatccggtgatctacatggagcccaagcgcatctaccgccagtacaaggaagtggtcgtcaacgacggcgaagccttgccgctggacgtctgcttcgtgctgcgcgacggcaccgacgtgaccctggtgacctggggcgcgcaggtgaaggaagcgctggaagcggcggacaagctggccggcgaaggcatcagtgccgaagtcatcgacgtggccacgctgcgtccgctggacttcgccaccatcgccgaatcggtggccaagaccggccgctgcgtgatcgtgcaggaggccccgaagaccgcgggcttcggcgccgagatcgccgcgcgcctggccgaggaatcgatctacgacctgctggcaccggtcgagcgcgtcactggctacgacacccacattccgctgttccgcctggaaatgaagtacctgccgagcgttgagcggatcgtggctgcggccaagcgcgcggtggcggccggctgacatgcgggcccgccttctgggggcttaccgcagccagtatcccaacccgctccggttccgcaccggccagatcgtcgaagtaggtgtccgtgacgaggaatggccggcgtttgcctgggtacgcaccaacgatgggcgcgctggatgggcgcccatcgcctggttgcagctgctggacgagggtcgcgccgaagcgctgtgcgactacgacgcccgcgagctggatgtggaaagcggcgagatggtgaagcttcatcacgaacacggcgggtggtggtggtccgagcgcgccaatggcgcgacgggttggctgccggcccgcgaactggaactgctggaagagaactgcaaatgagccagaccaagaacttcaacctgcccgacctgggcgaaggcctgccggacgcgaccatcgtcgagtggttcgtcaaggaaggcgatgtgatcaagctggacgagccgctggtgtcgatggagaccgccaaggccgtggtggaagtgccctcgccgttctccggcaaggtgctgaagctgtccggcggcgccggcgacatcatcccgaccggctcggtgctggccagcttcgaactggacccgaacctgccgcagcgagccgatggccaggacaccggccacagccatggccacgctgcaccggcggccgcaccgaccccgccgccgctgccggctgcggccgctccggctgccgccgaggaggccaagcccgccgcggccgagcgcgatgacgccggtaccgtggtcggcgcgatgcagagctccaatgccgtgcatgccgaacaggcgctggccgtcggtggcgtcaaggccgtgccggccgtgcgtgcgatggcgcgcaagctgggcgtggacctgagccgcgtggccgctaccggcaccgatggcgcggtgaccatggccgacgtcaagcaggctgccgccaacggcagcgccaagctcggcgctgctccggcaccggttgccgctgctgcctatgccgcgccggccccggcgcaggtgtctgccccggtgcagagcgaagcccgcaccccgctgtccgccgccggcaagccgatgcgtacccagccgccgggcgtggtcgccaagggccagccggaaccgctgaagggcgtgcgccgcaacatggcacgcgtgatggccgatgcgcacagcaaggtcgtgccgaccacgctgaacgacgacgccgacatccacgcctggctgccgggcaacgacgtcaccgcgcgcctggtgcgttcgatcgtggtcgccgcgcagaaggtgccggcgatgaacgcctggttcgacggtgaagcgctgacccgtaccctgcacgcgcaggtggacatcggcatcgccgtggacaccgacgacggcctgttcgtgccggccctgcgcaacgccgacatgctcgacgcacgcggcatccgcgaaggcgtcaaccgcctgcgcgagcaggtggaatcgcgttcgatcgcggcgtcggaactgagtggctacaccatctcgctgtccaacttcggcatgttcgccggccgctacgcgaccccggtcgtggtgccgccgtgcgtggccatcgtcggtgccggccgagcccgccaccagatgaccccggtgatgggcggcgtggaagcgcacaaggtgatcccgctgtcggtcaccttcgaccaccgcgcagccacgggtggtgaagctgcccgcttcctgcgcgcgatgatggacgacctggcactggccagctgatcggccacctgaccggtgggtgccaaccgttggttggcacatgacttggagagaacgccgggcattgcccggcgttttttttccggcatccacgcatggcgtggatctacacaatgcgggcgatcaatcgcgcgcgaccatgccttcggcgcggctgtacacacgcaggcggtggccatcaggatctgccccgacaaaggtatggccgaactccagcgtcaccggcgactgcaggatctgcacgccgagcccacgccacgcatcatgcatctgctgcacggcctcggggtttgcgaccaccatcgccagttcggcggcgcctgcctgcgcagacaccggcggttgcacgtcatcacgttgccacaggccgagtgcggcgccatcgccgagcaggaacagggcgaagccaggcgactgctcgaccggcggtttgccgaggatgccgctgtagaaggtggcgctggtggcgacgtcgcgcacgtactgcagcagggtgctgggcgtgaacatggggaagctccgttgttgggagcgatcatggtggtacggccctgctgacagattctgtcagtagcggcgagcgtgctctactgccgtcgctcctgccctggtagaggccgagcttgctcgactgccgttgccactgccctggtagaggtcgagcttgctcgactgctgttcgcgaagatcaaaggcggtcgagcaagctcgacccctaccaggagcaaagatcgaagagcaaagagcaaaagccgccaacccatcgcaccagcagcagaaagcgaagcgcaatgacagtcgagcaggcccgacgctacgaacggtccagccagtccggcgcgatgccctgcgccttctgccagcgccgcagcagcgtggcgcgtggtacgaggtagtgctcctccagcacgcgcacctggcggatgcgatccaggcggaaatggcgaaaatcctcgcggcgctcacaccacgccgccagcatcggcacctcatcgaagtagcccagcgcgaacggccagacgatgcgctcgctgcgctggccgtgcgcgtcctcgtagccgaacttcaggcgctgctgtgaaccgacagcctctcgcacggcctgcagacgagcagggggaaccttggccgccgcacgcgaagggcccacccgcaggccactgtcacgcagggcctcgcgccgcgctgcgggcaacacatgggcgatacgcgccagggcatcgcgtgcggcttcggccaacgcgggttcggtacgggccgcaacccagcgcaggcccagcaccagtgcgtcgatctcggccggtggcagggtcatcggcggcagggtatcgctcggcgtcagctggtagccgacgccggcctcgccgcgcaggtcggcgccctgctcgcgcagggtttcgatatcgcggtacagcgtgcgcaggctgactcccagcgcgtcggccagcacctggccggccaccggccgccgatggcggcgcagcagctgttggagctgggtcaggcgcagcgcacgcgacatcagccggccagtgcgctcgatgccaccacgtgctcacccggttgcggggccagcgcggcctcgaccagcgccttggcgatctcgctcgccgggttgatccgccacgcccgtggcagtgccggccccagcacgcccagcaccttcagcgcgagacgctcaccgcgccgcacctcgttgcgctcgccaccgatcaaccctgggcggaccagggtcaacgaggtgaagcccagcgcgcgcagatcgcgctccaattcacccttcacccggctgtagaagatcgacgaccgcggatcggcaccggctgcggaattcagcacataggtctgcgcacccttcgcctgcgccagacgggcgaacgccagcgggtaatcatggtcgatgcgatggaaggcctcgcggctgccagcctgggcaatggtgctacccagcgcgcagatgaccgcgtccacgcccgcccacccggcggcggcgggcagcgcatcgaaggccagtaccgggttctccagcttcccgtgggctgcgcccaacgggcgacgggtcggggcgatcacggcgctgcagcgcgggtcgtccagcagccggggcagggtcagcccaccgaccaggccggtcgcccccagcaacatcacgcgcatcaccacctccactgcggcatcctgtcgcccatcctagccgttcaagccgtcggcggccgcgccgatatgctggaaccagtccctgccagcccccaggattcgctccatgacggaccagcccgaccaccgccctgcccccggtaccgcccttgggccgccggcacgcgtgcgcgcggtggtggacgatgggctgggcgaccgcgtggtgctgcagggcggcggtggcgtggcgctgcagcagctgttcgcaggcgccgacgcgccggaaccgctgctggccgcgttcgccaacggcatggccaccctgcccggcgagctgggcgatatgggcgaccgcctgcagtcggcgcaggccagcgccgattggccgcgctacgggcgcgcgatgcggcagttgatcgacaagtacatccgcaccatcgaacagcattcgccggatgggcaacccgaaagcctgcgcctgtccgagcagctgcggctgctgctgggcggcgcggtggtggcgctgctgcagcacgacccggacctgcgcgaacaggcgcaggcactggccatgcacctgcgccagtggcagccaggcacggcgctggaaccgatcgagcagggcgtgcgcgaacttggccaccaggtcggcgtgcgtgccgagagctggcaggagcagcaggcactgctgctggagctgttcgcgctgctgctggagaacgtgagcgagctgctggatgaccgcagctggctgcagggccagatcgccgcggtacgccagctgctggacgggccgttggaagctgaggcggtcgagcgcacccgcgccgaactgcgcgaagtgatctacaagcagggcctgctgcgccagggcatcgacgattcgaaggcggcgatgcgcgggctgatgggcgagttcatcgagcgcatggatggcatggccaccagcaccggcgagtaccacgatcgcatcggcagctacgcactgcagctgcgcgaggcgcgcagcatcgccgacctcaaccagctgctgcaggacgtgatgcgcgacaccggcaaggtgcagcagcaggccgcgcaggcgcgcgatcacctggccaacgcacggcaggaagtggagcgtgccgagcagcgcatcgccgagctggagcaggaactgcgcgcggccggtgacctggcacgcatcgatccactgacccaggcgctgaaccgccgcggcctggacgaactgctgcaacgcgagctggcccgtgccgcacgcaacaactcgccgctgggcgtggcggtgatcgatctggatgatttccaccagaccaacgatgcacatggtcatgccggtggcgatgcactgctgcagcacctggtggccgtctgcaagctgctgctgcgcgccaccgatggcatcgcgcggctgggcggcgacgagttcgtactggtgctgccggaaacccagggcgccgacagcatggccacggtgcagcgccttcagcgttcactggcgcatcgcgtgctgaccgtgcaggaccggcgcgtaccggtgcatttcagtgccgggctggcgcaatggcaacccggcgacgacaccgaaaccctgctgcggcgcgcggacgacgcgctgtatgccgccaagcggcagggcaagaaccgcgtgcaggcaggctgaccgtccggcccgcagcaaactacgttggtaggtgccaaccttggttggcacacgcagaaacaaagcgccgaccaaggtcggcctctacccggcgacccgccggcgatgatcccgaccaccctgaaccgctttggtaggtgccaaccttggttggcacacgcaggaaacaaagcgccgaccaaggtcggcctctaccggggaacccgccggcgacgatgccgaccaccttgaaccgctttggtaggtgccaaccttggttggcacgcgtgggaaacaaagcgccgaccaaggtcggcctctaccggggaacctgccggcgactacttgccgcgcagcttctggaacccggtcaccgccgccagcacgatggcgccggcgatgatgcccaccaccatgttgcccgccgcgctgaccagccagccccactggccctcgccgcccagcgcctgtactgcgtggtgcagcgccggcacgttgtgcaccaggatgccgccgccgaccaggaacatggcaatggtgccggccaccgaaaggaacttcatcagccacggtgccgacgcgaccaggccgcgaccgaaggcggcaacagccccacccttgcgcgacaggtacaggcccacgtcatccagcttgacgatgcccgccaccagcccatagacgaagaccgtcatcgccagtgcaaccacggccagcgtgaccagctggttggtgaacgatgcggtggcgaccacgcccagggtcagtacgatgatctcggccgaaaggatgaagtcggtgcggatcgcacccttcaccttgtccttctcccacgcgaccatgtccacctgcgcgtcggccagcgccttgcggcgttcggtctggcgctcggcatcgtcgtcggccgaatgcaggaagcggtgcgccagcttctccacgccctcgaagcacaggaaggcaccaccgatcatcatcagcggcacgatcaggggcacgttccagccgcggctgtgcagccaggcttccagcgcactgatcgccagggccgccggcaccaggatcaccttgttgaccagcgagcccttggccaccgcccacaccaccggcagttcgcggttggcgttgaccccggtgacctgctgcgcgttcagcgccagatcgtcaccgagcacgccggcggtcttcttcgcggcgaccttggtcagcaccgagacatcgtcgagcagggtggcgatatcgtcgagcagggcgaacaggctggcaccggccatggggcgtccaagaaagggaataggcggattctgaccgatccggcgtggactgcggaagacaccgggttcaccgcatgcccaccgccccccggcgacactgcggaatccggacattgccggcccgcagccggcgctacctgtcttcgtcgcatgggagtcccgcttgagcaatccgtccgccgccaatggcaatcccccgctggtcaaaggcatgagccggcgcagccagatcctgcgcctgctgatgcgctaccgccattcgggcgtgttttcgggcatgaacctggatgcggcaagcaaccaggccgacgtgcccgccgacggcaatccggaacagttcgtcagcgacctggaagcgttggggccgaccttcgtcaagctgggccagatgctgtccacgcggccggacatggtgccggtggagttcgccacggcgctggagcgcatgcaggagaaggtggcgccgatcccggtcgagcgcatccacgcgatcatcgagcaggaactgggcgtaggggtgaacaagctgtttgcctcgttcgatcccgagccgttgggctgtgcttcgatcgcgcaggtacatcgcgcggtgctgcacgatggccgccaggtggcggtgaaggtgcagaagcctgaagtggccgcgcagctgcgctcggacctggaggcactgcgcagcttcgcgctggccgccgatcacctgacccaggtgggtcgccgcgtgcggttgcgcgactggctcaacgagttcgccaagaccctgatgcaggagctggactaccacgccgaggccgagaacctggcgcgcttcggacggcacctgcggccgttccgccggttgtgggtgccgcagccgatctgggactacagcagccagcgcgtgctgacgatggagcttgccaccggcgtgcgcgtggatgcgatctccggcgtacgccgcaccgagcaggacatggacccgttggcggcggcgctgatccgcggctacctggaccagatcttcgtgcatggcgagatccatgcagacccgcacccgggcaacctgcgggtgatgcccgacggccggctggcgatcttcgacctgggcatggtcgcgcacatgccgccgcgcctgcgcgagcgtctgctgaagatcctgttcgcggcggtcgacggccgtggcgaggaagtggccgatgacctgatcagtatcagcacgcggctggaggccttcgatgaagagcgctacctgcgcgaaaccggtcagctgatcgcgcgctatgcggccagtggcagcttctccgaaggccgcgtggtgctggacatggtgcgcatcgccaccgcctgcggcctgcgcacgccgccggaactgagcctgctcggcaaggccctgctcaacctggaaaccgtgtgccggctgctggcgccagagctggacacgcgccgcatcgtcgagcgccagctgcagcacgtgatgcgtgcgcgcctgaagaaatcgctgtctgcagccaacatcgccagcgaggcgatggagctgcagcagctgctgcgtgatgggccgcgcaagctgtcggacatcatggcgctgctggccgagaaccgcctgcagatgaaggtcaccggcctggaagaatcgcggctgatggagaacctgcagaagatcgccaaccgcgtggcggccggcatcatcagcgccgcattgatcatggccgccgcgatgatgatgaggatcgacaccggctggcacctgttcggttacccgctcatcgccctgatcctgttgttcatcggcgtggtgctcggcctgggcatcgtaaccagtgcattgctgttcgaccgtcgtgcgcgggcacgcgaagaacgcgggcatcgctagcgcatcgacgaaaacgcccgtattcatgcagtttttaatgcaatccagctgcccctttcacgctcgttttaccttctgagcgcgattacgcgcgcgtcatttcaacaaacatttcagtcaggttcgtgcatgcactatcgggtcatcggcctgtcacatgcatgtgcttgcggcagcgccggtcggatggacacgcgtcggtacgacgtccatcaccaccaccccgtcactgccgaagctgcctatgctctggatactgctgctgtcgttgttgctgttgtgctggtagttcctcgcgtccgacaagtgggtgtggtggaaggccggcgcgttctcgctgctgctgctcatgctcagcgcgtggtggctgatcgacaagctatccggtgatgggctcaatgccgccaccctgtaccacctcggcgccgacatggaaggtgccggtgtctccgacttcaagggctacatcgccggcttcatcgtgttggcgctggtttcgctgctgccactgttcgccacacgggtgaagcgctggcgccggcccggccacggtggcgcgttgttcgccggtttcgcggccgtgtgggtggccacgatcatgatcagcccgctggcccgtgacggccagcgcctgtaccagcagctgcgcccggtcgacttcgcccgcatcgcccctgagtaccaggtgccgacgcagccgctgcagcgcccgcgcaacatcgtctggatctacggcgaaagcctggaacgcacctatctggacgaggccgtgtttcccggcctgatgcccaacctcaaccgcctggcgtccgagtcgctggacgtgcgtgggctggcctcggccgaaggcagcggctggaccatcgccggcctggtgtcgtcgatgtgcggcgtgccgctgaccacctcgcagggcgatgaaaacagcatggaccgcatgggcagcttcctgcccaaggcggtctgcctgggcgactacctgaagcagcagggctacaccaaccattacctgggcggtgccaacggccagttcgccggcaagggccagttcctggccagccacggtttcgatgaagtgcacgacctggcatggttcaagcagcagaagaagatcggccgcatccactactcggcctggggcgtgcacgacgacgtgctgctggataccgcctaccagcgcttcgagcagctctcgcgtgccggttcaccgttcatgctgaccacgttgaccatggacacccaccacccggcgggccacctgccggtatcgtgcaagggcgagcgctaccagagccagtacggcaacatcaacatgctcaacgcgctcaagtgcagcgaccggctgatctcgcagctggtgcagcgcatccaggccagcccgtacggcaaggacacgctgatcgtgatcgcctccgaccacctggcgatgcccaacgatctgacccacatcctgacccggcagaagcgcgagaacctgctgctgttcctgggcgatggcattgccccgcagcagctcagcgccgacgccggcaccaccctggattcgggtgcgaccctgctcagcctgctggacccgaacctgaagacgatgggctttggccgctcgctgatcgacagccaacgcgcacccagcgccagcgtggcggccaggcgcgatggtggccgcgactacccgcagtatctggccttcgcccgctcactgtggctgggcgaaccgacccgcgaactgaacatcgatggcgatgaccaggtggtggtcggcctgcagcacgtgcagccaccggtgctgctggagtacgacaaggactgggggctgaagtcggtctacctggagaacacctcgcgccagttcgatgacgcggatccggacaacacgctggcctatgttgatcgctgcaccgcattcgaggacggctcggccgacggcgactggtgtgccctgctcgtcaaccgcgacaacggcatcaagctgtaccgcgacaacgacctgcgcggcggcatcgcggtcgatgcaccgctggacgcattccagggcccgcgcccgagcgtgcgccaggcgcacatgatcacccagaagggccgccgcacccgtgccggccagtacatgctgcagctggtggcgagcacgcgcccggatcgcggtttctggatcgaggcggtgtcctcgcagcgcaaggtggtgctggcccagcagtgggtgcagcccgatgccgacggcaagatcaacgtgtcgttcgggctggaccacgaagtggatgatctggagatccgcgcgtggttgaaccatgccgagaagctggcggtggatacgttcgcactggtgccctcgcgcagccgaccacggggatagggttctttgcagggctgcgccctgcacccgtggtagtgccggccgctggccggcaacctcagaagcaacggcaacagcgtgcaatccgtggtttggcggggcggtgtcgaccttggtcgacacactctgtcagatatcgaaaatcaagatggggtcagatccgttttcctccggaaaacggatctgaccccaagagcatttccgacagatcgcgggaaactgtcgaaggcggggtgggtccggtcgcgggagtgtccgcggcatggatgccgcggccaagcccccatgggtgagggcgctttgcttgcgaagcactgcttcgcaagcgcccgaacgcacagccgccagcggctgggccggcctgggggtttacggcgtctcccgcaaccggaccccccccgccatcccgcaggaaatcagcttttgctgttgctgttgaagttgccggccagcggccggcactactgggggggcagggcgcagccctgcaaaacaacccctactcctgcgggtcgcggatgatgtggatgtcggtcggggtcgacagcggaatgttccgctcggccaggatctgcagcaggctgaagtacagatcgctgcgggttgcatacacctgccgcgggctggccacgtacgcgaaactgttgatggtgatctggccaccggcaatgctgtcgatgtagaccgtcggcgccggctgcttcagcacgttggtgtgcgcgctgtacgcatccagcagcgcctgccgcaggttgccgacatcagtgctgggcggcaccgcgaactggatctggatgcggccctggttgttgcccatcgtcatgttgcgcacggtcttggtgaccagctcggagttgggcacgatcagcgtcgacttgtcgcccacctggatctcggtcgatcgcaggctgatgcggcggatgtcgccctcctggtcacccagcttcacccagtcgccgatcttcaccgggcgctcggccagcaggatcaggccggagacgaagttctgggtgatcacctgcaggccgaagccaatacccaccgacagtgcgctgaccagcagggccagcttgctcagctgcagccccatcgccgacagcgcccagatcaccgcgatgatgatgcccacgtatcgggcaacggtgctcaccgaattgcgcgcgcccaggtccagctcggtcttgggcaggtaggtgtcggtcagccagcgctgcaccagctgggtgatcgccaggccggccagcagcgccagtaccgccaacacgatccccgccggtgccagcttggtgccaccgatatcgaatccggtcgtgaacagtgaagtgaagcgctccaccaccgcgccgatgttgccgaacggtgccaccagcgccagcagcgcgatcagtacgacgatggtacgcagcgctgccgacagcagcacgcccgcctgttccagccgcgatacgctcaggccggtgctgagcaggatggtctggccgaccttgctgtcggcgttgagcatccacgtgctcaggtcatcgacgaacttgaacagcaacgtcgcggccaacaccacgatgctgccgccgatcaattgctggttcacgaacttggcgaaattcaggtagcccagcaatgtggcaatgatggcggccaccaccgcgatgttacccgctacccgggccagtaccagccagctgctgcggcgcaccggcgtggctgcacccacgccatcggcctgcgcttccagcttggcctcggcctcggcggtctgccggcgatgcaggcgcgccagggtcaccagcatggccatgatcaggccgaggtaagtcagcgcaatcagtccgtccagcgccaccgtggtgacgtcgctggtgcgcgtggcctggtccagggccaccagcaccgtgctcagccaggccagcgccgccgcgccccaggcgtacttgcgcagcttcagcgcggcggtgtcgtccaggttcaacagccgccacgacgggcgcttgggcaccagcaggcaggcgctgagtgcggcgatgaaggccgcgcggaacgttgcggtctccaggccgtcggccaccacctgcaggcgcggcgcgatcgcatcgatggcatccagcgccgccatcagcaccaccacggcgtaaccgggcagcagcgtgcccaccagcagcagccacatggccaggccggaccggcgcagtcgaccatcaggcgcacgttcggacgcagcaaaacggcgccccagcctgcgcagccacagccgcagtgggaacatcatcaccagcgcggccagcaggcccagcaacggcgtgccccagccatgggcgcggataccggcgaccagcgcatcgcggccctgcccggccaatggcgcaacccgcgcgatatcgatcggcagacgctcggccaccttgctccacagcgcgggcgacaacggcgaggccaccttctggcccagttcttccgtgcgttgcgcggctcgctgctgctcgatgtccgccgccagctgctgcgcacgcacggcactggccttggcctgcaccaccgaagcggccaggccgtcacgctgtttggtgagggtgcgccgttgcgccgccagctccggcggctcagcggccccttctgccggcgttcccagctgcgccagctgttcgttgagtcggtccagctgcggctgcagcgccttttccagcgcctcggcatcgcgccgtgcctgcgaggcattctcggacagcatcgccagcgtctcggtggcttctgcatcgccacgcttgcgctccacatccttcaggctggaatcgatatccgccagctgctgcttcggcgtggggtcctcatcctgcgccagcaccggcgcggacagcaggaaggcggtgcacagcagcaggacccaccagggcccccgtgcacggatcgatcgcaggaaagaagacacgcagccacaccggttcgcgcggaccaccgcgcctgcgcgcgactatacggcagagccggtcaaggccggatgggcggccccgccagcgtcgcgcatcagtacttcaggcgaagctcttccaccgtcggctgctgcagcgcataccagtcctggaactcttcctcggtgatctcatcgggcgcgtacaccgccaccgggtgccagtcgtggtcggtcggcagcggctggcgcgggccggcgcgcaggctgtaactcacaccttcgtagtcgaccagttcgtcgacctgcggccactgttcgcgcgcgaacgcagattcactcttcaacaggatcacctggtacatcggcacctccacctcggttggatcaggaaaacacggcgctggcggcaggatacccccaggccggtgacaacgggcgctccgccggggcgacggaacgttctggacacgaccatcgccccggcttcacccgcccatggcaaggccatcggcatcgtggaggcccacccctgccacgaccgccgatgaccgagcacccgccgctgagaaccgtcgccgacctcaagctgccgcgctacctgggcacctggtacgagatcgcacgcctgccgatgcgccacgagccggaaggctgcaccgacgtatcggcgcactacaccctgctcgacaacggcaacgtcggcgtcaccaaccgctgccgcatggacggcgagatcgaagaggccaccggcgaggcctgcgctgtcgacaacgacagcgcgcggctggaggtcagcttcctgcccaagggcctgcgctggctgccgttcgccaagggcgactactgggtgatccagatcgccccggactacagcgtgtcgctggtcggcagcccggatcgcaagtacctgtggctgctggcgcgcgagccgcgcctggacgcgaccgtgcaggaccattatctggcggcggcccgcctgcagggcttcgatctgtccgaactgatccagacgccacataccggcaaacccacagcctgagccccacgcacgcatggacctgaaaagcggttacccgtggtgggccgtacgcaacggactgatccaggcgttccccccgctggagaaggatctgcgctgcgatgtgctggtggtcggtggcggcatcaccggcgcgctgattgccgacgagctgtcccaccatggccatgacgtggccgtgatcgagcagcgtgacatcggctggggcagcacggcggccagcaccgcgctgctgcagtacgagatcgatacccatctgctcgaactggccgaacgctacgggcaagacgccgcagcacgggcgtaccgggcctgcgcggaggcaatcccggcactgggcgatgtggcacgcgggttgaaggacgtggatttccagcgcatggacagcctgtacctggccagccgccatcgcgacgtgccgcgcctgatggccgaaggtgaggcgcggcgcagcatcggcctggatgcccgctggctggaccgcgaagcgcttcgcgagcgtttcgacgtggatgccggcggcgccctgctgacccgccaggcggcgcgggtcgatccctactgtctcacctacggcctgctcaaacgagtgcgccgccgcggcggccatgtgcacgaccgcaccgtgctgcacacgctcaagcctggcgcgcagggcgtaaccgcgatgaccgaggccggcgccacggtccgtgcccgccacgtggtcctggccatgggctatgccaaccagacgtggctggaacagcgggttgcgcgcaaccgcagcagctatgccttcatcaccgatcccatcgaagcggacgtgctcggcaggctgcgcaacacgatggtgtgggaaagcgcccgcccgtacctgtacctgcgcgccaccggcgaccgccgcctgctggtgggtgggctggacgacgccatcgatatccccgcccggcgcgaccggcgcgttgatggcaaggccggcaagctgatgaagcagctacggcactggttcccgcgactggatccgatacccgccttttcctgggccggcaccttcgccgaaaccgccgacggcctgcccttcttcggcccgcacgcgcagtgggggccgcgggtccatttcgccatggcctacggcggcaacggcatcacttattcgatgatcggcgcccagctgctgcgggcccggatcgagcggcgcaggcatgcgctggaaaggctgttcgggttcgggcggttgtgacctgcagccggccgcggccggctctaccccaatccggcgccgacaggcatcattcaagcaacccctgctagcgtcggcctgtaccgccgcgagttgcgcggccacctgtccgctggagcgccgtcatgatccgccccctgaccctgctgctgtgcctggccctgccgggaaccgtgctggcccagtccgccgctggcgccactgcgccgcaggctgccggcctggacttgaccctgccgcaggcgccgatgcgctacctcaacgacccggccctgcagcaggacccgcccggcacctattacggtgacaagagcggcccgcgcgtgcacgacgatgcgaagatcgccgacgtgaccgacgacaaggtcaaggtgtccggcagcttcaccaccggcatcggctattcgaagaacggcggcaacagccactacaacgcggccacgctgaacctgagcaagaactacaccaccgatgaaggcaagacccatggggtcaacctcaacatccacgtgagtgagggcaagggcccgggcttcttcggcccgtatggcggctactacggccgcgggccgggctgggattacccgccgccgtacggctggtaagccagcccctgtagagccgagcccatgctcggctacggttggccgcaaagccgagcatgggctcggctctacagaggccaacgtcaatccagccagccatcgcgctcgctgtgcaggatgcggccgtcatagccgctcaggcgcacctctaccttctggttgcgggcattgcgggcttccagcgaccaggtcgcaccatcgcgttccagcgaatggatctcgcgcaggccatgcgactgcgcccgtgccagcacctgctcggtagtcagcagcgcgcggccgctgtgctcatcgaagatctcgccggtcttcgggtccacgtagacctcgctgaagcggccatcggcgcggctcatgtcagcctcccacaggccatcatcgcgttcgatctcgtggatctgggtgtagccggccttgcgcagggtctgttcaacctgggccatgcccagcggcgcggcctgtacggccggcgcgacggcaagcagggcaacagtggcgagggtgagcgacttcaacatgggggttctcctgttcgttgccggaccatcccggcaacgccacgatgcatggcccggttaacagcgccttagccgtggctgttagccggctgttagtcatccccgccacactcgcacctgtacccctctctctttccttacccgcatgctcgccaccctgcccctgctgctggccctggccaacgccccgaccgccgccgcgcccctgcaggacccggcgcagcaggtcgcgcgtcgcgccgtgcagcagggccgctacatgccgctggagagcgtggtgcgcgatgcgctcaagcgctaccccggccagctgctggaagtggagctggacgacggcgtctacgaagtggagatcctgcgcggcgacggcgtggtggtggagctggactatgatgcgcgcagcggaaagctgctgaagacggagctcgacgactgatgcgcatcctgttggccgaagacgatgccgcactggcacagcgcctggtgcccctgctggaacaggccggctatgtggtggcggtggtcgccgacggtcgccaggccgaagaaatcggccagatcgaagacctgcaggccgccatcgtcgacctcggcctgcccgggctggatggactgagcgtgatcgagcgctggcgcggcaacggccgggggtttccggtgctggtgctgaccgcgcgcgggcgctggcacgacaagctggccggcttcgatgccggcgccgacgattacctgaccaaacccttccaggccgatgagctggtgctgcgcctgcgcgccctgatccgccgcagccatggccacgccagcccgcgcctgcactgcggcccgctgcagctggacgtcaacgccggccgcttcgagctggatggacaggcgctgccactgagtccgcaggaattccgcctgctcagctacttcatccaccacagcggtcaggtgatcggccgcgaccggctgggcgaacaggtgttcgacggcggccacgacccggactccaacgcactggacgtgctgctcggacgcgtgcgccgcaagctcggcatcgacctgatccagaccgtgcgcggccagggctggcggctggccgagccatgaaccggcaaccgtcgctgcggcggcgcctgctgctggccggcggcgtcgggctgctgctggtctcgctgctggccagcgctctgctgggcgagctgttcaagcgcagcgcgcgcgaccgcctcgaccacgaactgcagcaggacatgctgaccctgctgtcacaggccgaagtggacccggacgggcagttgcgcctgcgccaggaacccaatgatgcgcgcttccagcgcgtgttttccggtgcctattggcagatcgccggtgccgatggccgcgtgctgctgcagtcgcgctcgctgtgggatgaaaccctgccggcgaaggccgccgggccggccacgcgcaatctgcccgggccgctgcaacaattcctgcgtgcacgcgtgcagcaggtgcgcctgccacgcgccagcgaaccgttcgtggccgtggtcgccaccgaccgcagcgcgctggatgccgatgttgccgcgttccgcaagcgcaccgccatcgcactgggcgtgctggtcgcggcgtggctggcggtgctggccagccaggtgcacttcggcctgcgcccgctgcatcgcctcggtgcgcagctggaacgggtacgtcgcggcgatgcgcagcgcatcgacacacagggactgggcgcggaggtcgcaccgctgggtgaagaactcaacgcgctgctggaccaccagcaacgcatggtcgcgcgtgcgcgcaccagtgcacaggatctggcgcacgcgctgaagactccactgagcgtattggccaccgaagctgacagcgacggcacgcattggcgtgccaccgtgcgcgagcagagtgcgcgcatgcaggccagtgttgaccgttacctggctgcaggactggctgccgaccatcgccagcgcaccgacgtggcggccgtcgcacaggcgatgtgccggctgatggcacgcgtgcatggcgaacgtggcatcgcgttcacggcggcaggcatcgatccggcgctgcagttcgccggcgccagtgcggatctggaggagatgctgggcaacctgctggacaacgccgggcgctgggcgcaacagcaggtcactgtcgaagcggaaaccagcgaagggcagctacgcgtcgaagtgcgcgacgatggccccggcctggccgcagacgcgctggaacgcgtcacccagcgtggtgtgcggctggacgagcgcgaaggcagcagcgggttgggcctggcgatcgtgggcgatatcgctgccagctatggcgggcggttgcagctggagaatgcgcagccgggcctacgtgcgacgttgtggttgccggtggcgtgacgcaccgctgcgctcgccgggcgccgcccggcgctaccggttcacccgccccccggtaggtgtcgaccttggtcgacacgcaccaagcatcaacggtgatgcatccaccagcaatcaatcgcgtccagcaatatgtggatgatcagaccgataccgaacaaccgcgttttcttcggcacgcacagcccggcatagaccgcgatggccggtgcggtgtgcagcgggtggaacccgatgctgcagcggttcggtgcatagatcgggtcggccagcagatggtccaggtcgatgatccagcccagcagcatcagcagccacgccgaggcaaagcgcttgcgccagaacagccatgccagcaacgctggcacggcggcatgcaggaacaggtggaagatcgcgcgcgcgctcatcggcaacggtggcaccgggcgggcccggtgccgtccatcacaccagcggctcgtcggacaggtaggtgtaaccggtcaggccggcttccagcgcgtccgacagttcctgcgcgcgttccggcgacagctgcgccgcagccacgcgctgcgcataggtcgcacgcagttcgtccaggcggtaacccacgtaatccagcatcacgtcggtggtgtcgccgcggcgctgctgggtgatggcgtagccatcggcatcggccagcacttccaccgcgtcggtatcgccgaacaggttgtggatgtcgcccaggatttcctggtaggcgccgaccatgaagaagccgatgcgatagctctcgcccggcctcatcttgtgcagcggcagcgagctgtccaggctctcgttctcgacataggtttccaccatgccgtccgagtcgcaggtcatgtcggcgatgatgccgcggcggtccggggtttcatccaggcgctcgatcggcacgatcgggaacacctggtcgatcgcccacacgtccgggatcgattcgaacacgctgaagttgacgaagtacttgtcgaccaggcgctcgttcagttcgtccagcaccgggcgatggctcttctcgtcgtagctcaggcgcgcgcgcacgccgtgggcgatggcgtagaacaggtcgtcgatgcgcgcacgctgcggcagatcgatctggcccagcgcgtagctggccaggccttcggcatggaaatgctgcgcttcctggaacagttccaccgccgggcgcacgtccagttcgtcgtggatctcgcgcaggtggcggatcgccgccggctcgtcgtcgtgctggtccggcacgcggccttcctgtgcctcttccacttccgacacgttggcgatcagcaccgcgtggtgcgcggtcattgcgcggccgcactcggtgacgatgcgcggcggggtcaggccgaactcttcgcaggcattggccagcggctgcacgatgttgctggcgtaggaatgcaggccgtagttgatcgagcagaagctgcgcgaacgggtaccttcgtaatccacgcccaggccaccacccacgtcgacgtgggtgatcttcgcgcccaggcgcgacagctccacgaagtagcgggtggcttcgcgcatgccgttggcgatgtcgcgcacgttggagatctgcgaacccatgtggaagtgcagcaggttcaggcagtcggcgtactcggtgtcacgcagcgacttccacaggtccagcagctggcgcggcgacaggccgaacttggccttgtcgccaccgctgttctgccacttgccggcacccagcgaggccaggcgcatgcgcacgcccaggcccggcttcacgtccagcgccttggactcttccagcaccagcttcagctcggacggcttctcgatgacgatgaaggtctgcaggcccagcttgcggccgatcagggccaagcggatgtactcgcggtccttgtagccgttgcagacgatcaggccacccgggcgcgacagcgccagcacggccatcagctcgggcttgctgcccgcttccaggccgaagccttcgccgtggtggctggccagggtgccggccacgccgcgggtctggttgaccttgatcgggtacacggcggtgtagccgccgctgtactcccagtcctgctgggcctgggcgaaggccgcctgcagcttgcccaggcgctggccgaggatgtccgggaagcgcaccagcagcggcagcttggcaccggccgcgcgcgcagcgtccaccaccttgggcagcgataccaccgggccgtccgccccggtcggtctcaccaccatgtgcccggcctgatccacgtcgaagtaaccgtccgcccaatgcgggatcgagtaggtcttgcgggcttggtcgagggaccaatcggtcatttcagtcggccttgttggcaataaaagggggggcatgataacgcctatatgcccacaggttcgttatcatgcgcgcccgcgcccgtgacaggttccaacctgaacgggccgatccgtccggatgtggcatctgtgccacgcggccccgcccgccagcccggctccacccctccgaacaggactgttttccaatgactgacagcaacaactggtacatcgaacacttcgagcgcaccggctcggccatcggctaccgcatcaccggcaagctggacgaggtgcagtcgccgttccagaaaatcgagatcttccagaccaccgactggggcaacctgatgaccatcgacggggccatcatgctgaccagcaaggacaacttcttctaccacgagatgatcagccacccggtgctgttcacccacgctgcgcccaagcgcgtggtgatcatcggtggcggcgactgcggcaccctgcgcgaagtgctcaagcacagcggcgtggagagcgtgacccagtgcgacatcgacgagcaggtcaccgtgatggcgcgcaagcacttcccggaactgtgcgactccaacgatgacgcccgcgccgagctgctgttcgacgacggcgtagcctacatggccaactgcccggccggcagcgtggacgtggtgatcgtcgattcgaccgacccggtcggccccggcgaaggcctgttcaacaaggccttctacgagagctgcttcaaggccctgaaggacgacggcatcctggtgcagcagtccgaatcgccgctgatgcagctggacctgatcaacgaaatgcgcaccgagatgggcaaggccggcttcggttcgttcaagaccctgccgttcccgcagccgtgctaccccaccggctggtggagcgtgaccatggcgcgcaagggcgacagcagcttcgacttccgccaggccgactcggccgccaagaccttcaacaccctgtactacaccgccgcgctgcacaccggcgtgctggtgaccccgccgttcgtgcaggcggcactgaagggttgatccaaacaaaaacccgcgctggcgacagcgcgggttttctgctttctgtagagccgagcccacgctcggctgctcttcggacaggttgcggtaaacccagccgagcatgggctcggctctacagtcaaagcgcccagataccggcgatcaccgccaccaccaggccccacttgatcagctggtaggccaccacgctgcgctcgcgcagcgccttggccttcaggcgcaccttgtagacactgccgaacgccttgttgacgccaccggtcgggtcacccggcaggttcggcgatgcaccaccggccagcagcgtggccgccaccgcgcggttgaacagccccggcaggccgaagcgcagcgggcgggcgatgtcgcagaacaggatcacccggtcctgctgcgtctcgttgtgcgcatggtggatgtaggtctcgtcgaacatcatccactcgccgtcgcgccagctcttcttgatgccgtccacttcgatgtagcaggcatcgtcgttgggcgtgctcaggcccaggtgcaggcgcagcgagccagcgaacgggtcgcggtgcgggcgcagctcactgcccggtggcagctgcgcgaacatcgccgcacgcacgtccgggatcgactcgatcagcgccgtggtcttcgggcacagcgtcttcgccgacgggtgcgacgggccgtaccacttcaggtagaagcgcttccagccacgacggaagaacgaattgaagccggcatcgttgaacgtgctggaggcagcgatcttctgcgcgtcgcgcagcgccagcgcctcgtcgcggatcatctgccagttctggcgcagcggctccagctgcgggaactctttgcccgggtccaggaacggcgtggtcggcaccttcgagaacatgtacatgaccacgttgatcggggccatgaaactggagtggtccagcagctggcgcgaccagcgcgcgcggaccttgccacggaagtggatgtacagcacgcaggccacgaacagcgctgcaatgacgattttgatgatcaaagcactttcctccagccgcggccggaacgggaaacggggcgatgcacggccaggcggccagcaccggttcggaacgcggcaggggacggggacgtgccggaggggggcggccgccgatgtcgcgggttaacagcttatggtcggcagggcgtgcgccggggtcaagctggacgtgcgtggcgttcagcgcgccgccaatgaatgggctggaagcgcgcccaactcattgattcagcggggcaacccttataagtgagacggaattgtccgattctgcgtgacgaactgttccagccacgaccccgacatttctccgacaaatcgtggaatagcgaactggcgagtactaaaattaacgaaaacttagtaactccctgtaacaccggttcgcttgacgctttgcgccacccaccgggtcgtccgagaccccgacatgcatcttcctgctcttcccccctcctcctgcggcaatgatgccgcctccccgctgctgctcaagcgcggcgaacgtttcctggcccccgactgttggcgcgcacttaaaactgacccaggctgcgcgttgaactttgacccacccggtgtacggggctgagggtatcagttggtggtctgggtggtggcctcctttgccctgattctggctttggtcttgttggcggcggtgctgttgcgcagccgccaggagtcgttgccggtctccaggatgtggcagtggtgggtgatgcgatccagcagcgcggtggtcatcttggcgtcgccgaacacctgaccccattcggagaaggccaagttggtggtgatggcgaggctggtgcgctcgtagagcttgctgatcaggtggaacagcagcgcgccgcctgagggggtgaacggcaggtagcccagttcatcgaggatgaccaggtcggcataggtcaggcgcagggcgatctgcccggccttgccctgggcctgttccttctccagcgcattgaccagttcgatggtggagaagaagcgcacgcgcaggcgatgctggcgcacggcctggatgccgatggcggtggccaggtgggtcttgccggtgcccggtccaccgacaaggacgacgttctcgggggtgtggatgaagtcaccctggtggagtcgttcgaccagtgcgcgatcaacgggactggccgcgaagtcgaacccgagcaggtcacgatggacggggaaacgtgcggccttcatctggttggcctgggcacgaacctgccgttcggcggactcggcctgcagcagttcggccatccagtgttcgggctccatggtgtgcaggcgcatcttggccagcagttcgggccactggctggccatgccgtgcagcttgagctgctgcatgcgcagcggcaggtcaggcgtcgacatgatctgcctcccgcagggcgtcgtagcgggccggatcggacaccggcggatgacgcagcgtcactcgcgaggcgaccgtctcgatcgtgcggtccggatgctgcaatcgccccagcacgttgagcacgtggtcggcgcgcaccaggccggactcgagtgccagttccaccgccaccagtaccgcttcgagcccgtgcacgggtacggcggccagcacctgggccatggcgcggtcgccgtgaggctggcgcagcaacacctgctgcagcttgcgcagcggatcgggcatggacaggaacggcgcgccgtcacgcagtgcccccggcttgcgctggaccagggcgatgtagtgctgccagtcgtagtggacccgatcacgctcgaagctgcgccggtggcgggcgacctcggcctcgccgaccaccacggccagttcgaagggatacacgcgcaggctggcgacggcgtgggcgtgttcgcacggcacgctgtagcggttgcgctggaagctgaccagcgcggtcgaactgacccgcaccggccgctcgatgtagccgtcgaagggcgcgggcatcggcatcaggtggggctgttcgtcctccagagcttcggccacggtgatgtcggaggcatccggatgcgcctgcatcggccaagcggcgcggcactcgctggcgagccaggcgttgagggtgtccagatctggccagtggcgggccccggcctcgacccagatctgtcggcgccggtcctgcacgttcttctcgacccgccccttctcccaacccgcggcgcggttgcagaactccgcggcgaacaggtagtggctgatcatggcgtggaagcgggcgttgacccgccgttcccggtgctggccgatcccgtccaccgccgtcttcatgttgtcgtagatgccgcggcgcggcacgccaccgaaggcggtaaacgcctgggtatgagcatcgaacagcatctcgtggctctgggtgggataggccaccaaccagaaggcgcggctgcaggccagcttcacgtgggcgagatccagcggcatcttggcgtggctgccgacgaaggcgtactcgcggctccagtcgaactggaaggcttcacccggaggaaagtgcaacggcacgaaggccgggcggcggctggcgccgccggccgccttccactggcggatgaaggccgtcacccgggtgtaggtgcccggatagccgatcgcctgcaactgcgagaacagcaccttggcggtgcgttgttcccgccggggacgatggctgtcggcacgcagccacgtctccaactgggaccggtagggatcgagccgggaggccgaggctcgcctgggatagaccggctcggactggccgctgcgcagccatcgccggatggtattgcgggataggcccgtgcgcttggcgatctcgcgcagcggcaggccatcgcggaaatgcatccgccggatcttggccaacatgaccatggtgatcactcctgaaatcccccgagcaaaagatgctcaggatgtgggcttcaggtgggtcagttttacccgcgcatcaccgccgaaagtgggtcagttctggatgcgcgccaacaccccgacgtctaccgcacctgcctggacgggcgcgaggcggtcatcaaggactactcccgctaccgcggcactcccgtttcgctgatcgcgcggctgatggtgcgccgtgaagcacgcatgctgcagcgcctcggcggctggaagcatgcccccgcgctgctcggcacgctgggtggcctggcgctgggcatggagttcatccccggccagaccttgagcaccgcgcaggccgtcggcaatgacgtgttcgagcagctgcaacacgcgctcagccgcctgcatgccgccggcatcacccacaacgacctgcatggcaccaacgtggtggtcagtggcggcgtgccggtgctgctggatttcacctccgcctggcgcgtaccccgctggctgcgccgcggcccgctgagccggcagatgcgccgcagcgacatgaagaacctgctgaagatccgccagcgcgtcaccggccaggcgccgagcgccgcgcaggccgcattggtggccgacccgggctgggtcgccgccgtgcgccagggctggaagcggttctacaagtgggccaagcggcggtaggggtcgagctcgctcgaccactttaccgctctttgtagagccgagcccgcgctcggctgctgttcctgcatcgcgcgaaatgcagccgagcatgggctcggctctacaacatcccgccgagcgggttacaacgcgtccgcgtccaactcgccggtacggatacgcaccacgctgcccaggtcgtacacgaacaccttgccgtccccaatcttgccggtgccggcggccttcacgatggcctcaaccaccgcctccacctggtcatcggttaccgccacttccagcttcaccttcggcaggaaatcgaccacatactccgcgccacggtacagctcggtatggcccttctggcgaccaaagcccttcacttccgtcaccgtgatcccggtaaccccacgctcggccagcgcttcgcgcacgtcgtcgagcttgaacggcttgatcaccgccatgaccatcttcatcgtctatctcctgtcttccggcgtggaggatagcgcctgaacacggcccgtgcgaagccgctgccgcctgtccgggcagtgggtgccggcagtatccttgtgcccgaacggcctgcccgcgccggatgcacgggcccacccccacggagcaccctatgatcgacctgaaccaaatcgatgacctcgcccgtcgcctcagcgacctggtgccgccgggcctgcgcgaatcgcgcgaggaactgcaggccaccttcaagagcgcgttgcaggccggcctggccaagctggacctggtcacccgcgaggagttcgaagtgcagcgcgccgtgctgctgaagacccgccagaagctggacgcgctggaaaccgccgtgcgcgagctggaagggcgcggcgccgcagaatgaaaaaaggaggcgcactgcgcctcccgtttacagattatttcccggatggggccttgcagcaaggcccaccgggcgccctagactcgccggcctgtcgatccggcagcacagagaggggcagcagcaatggcacaggacaccgactggacacccgtttcgcatgacacctgcgaccaggtggctgggccgttctatcacggcacccgcgctgacctggccgtgggcgacttgctgagcgcgggcttccgctccaactatcgcgacagcgtggtgatgaaccacatctacttcaccacgattgccaagggcgccgggttggctgcggagatggctcgcggtgaagggcgaccgcgcgtgtatgtggtggagccgaccgggccgttcgaggacgatccgaacgtgaccaacaagaagtttcccggcaacccgacgcgatcgtatcggagtgcgcagccgttgcgggtggttggggaggttacggagtgggaagcctacgacgcggagttcgttcggcagttgaaggcgtttgttgcttcggggagtggggagatcatcaactgatggcctgctggcgctgggcgttgcgcacttcttcatcggcttcatagatgtccagcccgagctcaatgccgcgctcacccaaggcgagcagcgcgcgaggcgaaagcgagacaccaccgttgctgctgcccatgaaaagaccgcagaacagatcaggtcggaagcgtgccagagcctgccatacggcgagatcgccggtgagttgatcgaggatctcgaagatctgagcgtccagatcttcaggctcacgacgctccgcatcaagttgccagcttccagtcctggcgatacgcacggtgcctgatcggctgcctctgagttcctggcccttgtgatgcgatgcggtcggggtcgccccgagcaaggcactgacttcatcgggtaggaggtcatccccgaagaatcggagggttaccagggaatgatcgaatgctgccatgggaatccagctgtccttttcggaatgtattccagtgcgtaggcctcgttgatgtcagattccagccggaaccggacgacagcagcttcagaataggccgaaccggggaatcggcttgggctcaaacggagagctggccggttcctacttgaacatgtccaacaagtccttgtcttcatgccgctgctcccacgtggagagcaagcagaagctcaccccactgcgcatggcaaccgtctggaaccccgcgagctcttccttcgtgatcggatactcgaccggatcaaagtgcaggagcgcccacggcttgaggagtgagaacccggacgcgagttccgagaagagttccttcagcatgggtcgcatggtggagaagtctttgatcggccccgcgcgattgccaagggcgcggcactggcgacgaatggttctgtcaccacctaccaagcgagcgatgaagtgatcctggtgcacttgaacgtagaacaattgccggcgaaatatcttcattccccgcaccgccccccaaaagcccagccgtgcaaatcatcaagcgccatccggaagccggacctgcgccgcgcattctgccgcaacggacccaagcgctgtgcccttcatccgtgaaagtgctgcaagagtacgtcgttcatacgcctccgcgactcccggatctggctcgatgaacggcgatgtgcagatatcctcgaccttgaatccccgtgtgatcaatgccaagacccgctcaggcgctttgggcaatgcacgggctaccgcgtaattgatggatagcgaggcgcccgcatctgaaaacggctttagcgcagccgcaacctcgagccatgcaggatcgcctgactcgatgccagaggtgacccgaccaaactcccgctcgtgctcccacaggtcccaaagcaccttgcgccccccttcgttggcaacgcgattgagcacggcctgtgccgaagggcgatccgccgcgactgcagctggactggcaagcgcaagcacgagtaggagcactgtcatgcttctcatggaacctgactccctgatggatggacccttgggtccggtcatacgtcctgcccacaaagcaccatgtggcgtgctttcccctgatacagcgcgatcctagggcggctgggtttggccatcaagccggcgcatggccagacccaggcataggatcagaagccccgacaaatccacgttcaagacaccacgggcatgtccgctacgggtcgctggcagatcactgatccacaggaaatgccctgcgcgagccaatgtccgcttccggccagtagcagacgctactggtcacgaactctgacgtacgccttcaagacccctattagagaaatgatgcgctttgcggctgttgccgcttcgaaagcatgtttgatctcaacatcgtacgggcggggatgtatcgtccaagcttcacttagttcaatttcatttcgctcaataacacatgcggcgaatatcaaacgttgaacatgcccgttcccatcaagaaaggggtgaaccaggccaaagatgtaaaacaggatggctatctcgcgcaatatcgttgcaacgtctgtgccaggactgaggctgaatactttacctgcctgaactgcaatccgatccaaattactcgctacaccttctggtgcaacaaactcctggaatgttccgtcatcatcgcgagtaacgccactacgacgattcgccagagttgtaccatttgtcccgcgataggtgcctgcgtactcggggcactgcagcggcgtcaacttggcatagagcctttcgtgaactgtcctaggatcagtgatgaactccagtcgttcttgggagctcgcttccaacagcccttgcagctccgccgcacatccagcttccaacacttcatcgtaattcgccatctcgtgcgggtcccacttcacgacttctatcattcgatcatcaccaatctaaggcaggctatagcaatgaatcaaaacaatagcagctcatcttccccagtgtggggggcggattgtgatctcgagaacatagccccaagactgggcttcctaggttcgagccacttcctcgcgatcaaagatgcgcgttcgccagtccaccaatccactttgtccgcttcaggccagaagcagtccttcatcgcaggcccagcccgaactgccaccggtgcggttgatacatgcttcgcgcgggtggtagtaggcccgtaaggatcattgacgaaagtacagcatggcgtccattgcaatcgcaaagcatcaacgtgcagcacgcatgatctcaagacaacatgacctgcgacagtagcccgagagcctaggccaaaggcgtcatcccccagggctagcttcgaaatgttaggccccagctaggcgaccgaagtatccttctagcatctcggcggttgaagaatgtattgcttcgatggcaccgactgcttcttcgaacaactgctccgggatttcctcctggcttccaacagccacaacaatggcaccctctttttgaccaggaccgacggctgagaaaatgtggctctccgacagatggacccatccagagagtgtctcgtaaacaggctctacccaatcaatctccgctttaagcgagtctactaggtgacggtcggttagtgcagttccgtttcgatctttgaacttgcggaggctgttgccgccaacaacgtgaagtgcgagatcgtcgatcgactccacgattcggtacgcatgtagcctgagaagtccgtcaagttgaacgcgaagaagtggagcaagtgcatgaatgttgcgctcattgactagtgccggcattgctcgaagcagccccaggttcctattgagaattccaaacatgacaagatccgcggcataaagcggcttgccttcagctgagcgaaggtgaccggagaagatcgccaagtagcgcttcgtagcctcctcaacgatttcttcgatgcgcaaggtgagcatgttccgggattcgacgagtgacataagcggtactgcggagcgagttcagcctggatgactattgtacctgcactctctcaccgggcgtccgcttccggccaggagcggacatcaatcgcaagagtcttccttatcgcggaacacaggcgcgagagtctgagctccatcaggccggctagaggcgcgatgcgcgattctcaagctcgacccttgccacgctactgcaagatgattgcagctattggccttggtctactccagcaattcgtcactcccgcctttccgcctggatatggatagacgaaacaccggaagccaaggaatgattggaccaagcatccagctcttctgcaattgagccactcaagagccatccgcggccggtgtactgagccgaagccagggcaagaaccacaaattcaggccacgattgcgcggcatgacgggagcaggcactcaccacgaagccgcccttgtgatatggctcggcgtggagattgctgacttcaagacctgcttgctcaaacatccgcgccgcgaccttgagagccgcctgctgcgttgtgcaattggtgaacaagcgccagtacaactccatgagtccacaatcttccaaaaggccctctgggcgtggttgcgctacttatagcagacggcgcgcacgacctttcccctcttgccacccgtggtgccagcatcaaggaacagatggttgaagagcacccacggcttgaacagcgagcacactggcatgaatcccgagaagatcaccttgagctggggccggagaatcgagaagtccttgttcggccctctatgttcctgtcgcgcgcccccatcaatgcgcagcctgcgccttcagcgcgcttgaatccctgcgcagcaggtacagcgcaaccaggaacggccacagcgagttgatcgacgagaacacgcgctgtgtcagcccccggtagccctccgggtccacgcccaccacgttcaaccagagatagacgatgctcgcgatgctcaccaacgcggtcacagcataagcccttcggttggcagaccatgcgctcaattcgatgtgcgacatcgccggtgcaatgatgtttgcgataccgatggtgtagaagccgtgcatcggatggcccatgggccagagcccgttgctcagcatggaaatgccaaagaccaaccagcagactgcacctacggcaatccgccggccggactcccgccatatcccgatggcaaacgccacgaagcccacgccggagccgagggcggcgatcctgccgcagatgcttgcaagcgtgggcgcctgcagcagctcgctggcgtgctgcgcaagcgggttgtagcccggcgcgaacagggcagcaacgctggtccagaacaggaaccacggaagcgggagcagacccgcagacagaagaagtcgattgcggcgtaacacgtgcagtgatccttgtagcggcctgcgccagtgggtggagtccgttcaaacgccgcagaaccttcctgctgcgggcaggacagttcctggtgactacagcggtagtcagattctgcgtgacggcccacggggtcaataggcagaaagtcactcacgcatggaggcgagttacgcggcatccatcagcgaccgtcggaccaatgctgtcgcatttgccgcgccctacatctctgacggaaggttctgacgactccgttccagaagtgccgctgcgcctagcacgccaaggctctcgccgcttcaggtgctatgcgacaatgccaaaagcgtctcgggttttggcggcattgacccctacccgttggcattccgcacaacagcaggtaatcgttactgcgccaccgtgcatcggtggtcgggactcgaaaacccggattgctagacgtaagtttgcgcttgccagccggcaccaccgcgcgtggtgccggctggcaatccgtctgccggctatggcgggcggggcgtgggggcctcgtgcccgccggctttgtctagcaaccggttttcgagccacgccctgtccgccacctttatcggtggcggcttctgcctgcatgcacggagcccgccatgaccacgccgcactcccctcccccgcgcccgatccaggaagcgccgtcacgcgctccgagccctgaccccaacagcctcatcgccatcctgcacgccattggcgcaggcgctgcggccgatggccagccctggcccgagcggtatcatctacgcagccggcagatgcagttgtccgacgccgactgcgcactcaccggccagcgcatcgtgcaggagatcctgctggcggccgagcgcacgcgccagaacggtgagcccgagcagtacgtcggcgaccgggtgatggaggggctggtgatggccgatctggcgctgaccgccttcatccacgagcggatgcgacccaaggactgagcgcacgcttatggcgcggacctttctgcctgtgtgcgggggcgacgaatgaagatgcacggcctggccgctgcggtggtgtgcatcgcagtgatcggcgcgatgtgggtggagtggcccgagcccgcgggcgatcaggtgtgggcctaccagaagctgcagccggccgattaccgcctgctgcacagtgatgcactcggcttcgtgaccgcgaaggcccacgagggttttgaactgcacgcgcgctatgccggggtaatgtccttcgagatccgctgcaagggcgtgctggttatggaggtggagaacgcgccctcgcgcgtgctgatccgcatgcccgccgatgcacggtggcgggcgccggatatcgaacggctgcgcatcagcttcgagcgttggctggatctgcaccagagccaggggcgattgctggtggaaagcgcggggccttcgtgggttgaggcacggtttgggcgcttcaatgggttggtgctggatgagcagcggtgtctgcttggggcgccggcgcaccgccaggccgatcccaccaacgacttcagcgctgaagtgccttcgtaggctgacgcctatagtggcgctgcatctgcacagtaaggggccgcccgccgctcgatcatcaagggcggcgccaacgtcaggggcggtctgtactgacggaaaccgagccgtcttccagcaggtggacgcttacatatgcgtctggcggaggtatccgatcgatcgacgcccctgcggggagaatttcccaacttgtgatcgggccgcagactgtcctatgcaccaaacggctgctatccaaccctcgcttggcaagctcggccacaactacttcaggcggctggcggtcgaggcccttgtaggctgtacacgtctctcccgtctggccaatgggatacgttgaactctccacctcatcccggcaccccggcaggcccatggcgagcgagagggccatcagtacttgcaagccgcgagggacttgaagtgaacgcattttttccagcagctgatgtagagatgggcatgctttcacttgcagcccggtgcacctccccgcagaaagcacaagtcgcccattgggcgacttgttctctggtgcaaacgagatcacggaagggggcacgcctatcgccttcgacgcgaattttcccaccactgcttcaacgcaagaaacagatgaaggaataggaagatcaccgcgaagtagacccaaatacgcaatcccgtatgcatagcgtccgggtaattgcggtacgtgagaactgcgaagtaagaagcgccaaagaccgcagcgagaagctgagtgcctaggaggcctttcaacaagggactcattttttcttctccaggtccttctgtacgacagtcgcccctgctcccgccaggccctgccccgcttgggacgccgcgccctggagtgccgattgcctgggaatggcagttccggttgacgcagtggcacttgccatgttcggcccacctgggccgcgggattgactcagccgttggagtgatccgcgtgcagctgggcctgcgaaatcacccatggcaacgccaaccccggaggctgccaatccacccgctgcactgccaatcgcatttgaagcgacgccctccgccgtgatgggttgccctttgattgcgctctctgcggcggagccagcaccacccgccaccgcattgaccacggtctgtatggcaaccgcacgccctaccgaaatcgtgccggaacccactgccgcaacggccactccaccagcgcctccggagactgagccaaccgcagcagcaatgccagcctccactttgtcgataggcttatccggattcatggctttttggaccgcgatgtctgcgaggccgcccaggacggcaccgtagatgaatggcattactggaacccttccgtccggatcggtgaaggagtacggattgccataagcgtagctgtatcgattgaagtgtttcgtgcttgaatgcgtagagatcggatccaccgagaggaagagtcccaactggggatcatagtagcgctgctgcatgtagctcagcccagtggcagcgtcgctcacgtgtcccgtatatccaggtccatccgcaacctgcccgccaacaacggccccatagggttcgtagtcatagcgcttgaccacgttgccattggcgtcggtctcggcaaccaccgaaccaagcgcatcggtatgaatgtaggtgaccgtctcggcacttgccgatggcgtcagcgccaggctcatcattagtgtgcaacagagccaggcccccacggagccccgttcgggaatgcgcttcgccacccccaaaaggacgagggaaacacgacgatcagcctcctcaatcgtttccattctccccatccccttgaaagagccttccagcaagattccgtcttcatatcacagcccccgatggctggggaagtcacattgaaaaccagtgcgagttgacgtgaatcaagcggtggctgttgccacgctgtttttccagaagcatccatggttgcaccacctgggatgcccaagtggaattggcgtagcgcttggaaatgcgtggtcatgtgtaaccgacaccattcaatttgagtagaacgtcaatttgagtagcattccaatttgagtagcacggcgaattggcgtccatcgttcacttgatggccgaatcttgtttccgcagaggaggaaggcatgccccaaccgtctgccggaatccccctagccgcttcaccagcaattcccgatggttggccgcagctcacctgccgcatcatcaagcgcccgactgcaggaatccacacatgagcctggcgctggtccacagccgtgcccgcgccggggtcgatgccccactggtgcgggtggaagtgcacctctctggcggcctgcctgccacccagattgtcggcctggccgagaccagcgtgcgcgaatcgcgcgagcgcgtgcgtgccgccctgctatgtgcgcgctttgactttccgcagcggcgcatcacgctcaacctcgcgcctgccgacctgcccaaggaaggtgggcgttacgacctggcgattgcgctgggcattcttgccgcgagtggccaggtcgatccgcagtcgctgctgcaatacgagtttctgggcgagctggggctgaccggcgaactgcggccggtggccggagcgctgcctgctgcgattgcggcggctgatgccggccgcatcctggtggtgccgcccggcaatgccgccgaggcggcgctggccgagcacgcggatgtgcgcgtggcgcgcacgctactggagtgctgcgccggtctgggcaatccgcgcctgctgccgcccgtggagcgcgtggacacgacaccgttgcccctacccgatctggccgacgtgcgggggcaggcgcatgcacggcgcgcgttggaagtggcggccgccggtgggcaccatctgttgttgatcggcagccctggctgcggcaagacgctgttggcttcgcgcctgcccagcctgttgccggataccgaggaagccgaggcgttgcagctggccgcgattgcctcggtgagtggcgaagggctggacccaagacgatggcggcagcggcccttccgggcaccgcaccacagtgcgagcgcggcggcgcttgtgggtggcggcaatccgccctgccctggcgaaatctcgttggcccatcacggtgtccttttcctcgatgagcttcccgagtggaatcgaagtgcgttggaaaccctgcgcgagccgctggagtccggccacatccgcatcgcccgcgcggcacgcagcgtgcagtatcccgcgcgctttcagctcgtggccgcgatgaatccctgcccctgcggctgggccggtgaccgcagcaatcgctgcctgtgcagcgacgagcgtatcaaccgttaccgtgcgcgggtgtctggtccgttgctggaccgtatcgacctgcatatcagtgtggcccgtatggacgcagtggagttgcgggagagcacgccgctgggggagcccagtgcggcggtacgtgcacgggtggaagccgcccatgccaagcagcaggtgcgtggcgggctcaacgcgcatctgccgccggcggcactgcgggcctgtacccgactgagcgaggcagatcaggacatgctggaacaggccatcgagcgcctgcagctgtcggcgcgggcgatgcaccggattctgcgggtggcgcgcacgattgccgatctggcgggttgcgaaacgatccagacggcgcatctggccgaggccattggctaccggcagctggaccgggggaaggcgagcacgtaatcgcagcgggcagaatcaggccgcgtcatgcgggcacacgttcaaaaagatccggcagccattccggcttgaacagggaagcaggctgttctctcatctcttctacgcgccaccatttccacgccctgatcgtggcattttcctcctccgtccacccgtcacgctggatgtcgggctggttggggctgcggaccagaaaatattcttccagccatcgcgcgggcgttgatcgggcgaccgcgtagacggcatcgcgcttttccagccgcacgcctatcggcagatccaatccggtctcctccctgagctcacgccgtgcggcgtccgcatatccctccccgggcagaagctccccgcccggtgtagcccagaagggagcgtggtgttcatcgtgataccggaacagcaacaccgcatcctcagcaacgatcacaaggcgtgcagatcgtctgatttccatcgtttcccgtccttaccagcccgccccagaataggccaaaagcaggcggaccaagagaaagccatcaacgcgtgtcgattcctggccagtgattcactttcccaggatgggcgcctgtcgccggacggcaacggacgccatgcggcggctgacaaggccgaagaggtcctgcagttcggctgcgcgctcgggcgtgctgttgctgccgaaaagcacacgcgccagcgcggcttcacgggtgtcatgcgggaaccgcaggcggtcccggtacaccttctggcacaccagccaggcccggcgcagcccaccgccgggcagcgggcggaccacgcgttcgtagacctgccagaactggtactcgccctgcagatcgatcgccggcgccacggacagcgcctgccggggccgtcctgggccccggatgccgaacaacggggttcgcgggttgtgctgtgccatgccaacaggatgacccagcaacattgtgggaaccttgcgtcgccgccagaaaacccctgttgtttgcgcaaggcgggtttctaggcgggttttgggggtcagagccctttgctgcgcaaagggctctgaccccgatcacggggtggctgcggggtcggatccctttgcgcagcaaagggctctgaccccaccctcatcgcctcagaacgccatcgaggtactgaacatcagctgccgtggcgcgctgcgctgcagggtctggtaatcccccgagaacgacgagccggcaatggtggcggtgccgatgttgtggcggttgaacaggttgctcacgtccagccgcagctccaggccgggcaccgcgctgtcggcaccgaagcggtaggcggcataggtgttgacctgccagaacgtcggcacgcggatgtcgttctcgtaggtgaagggctggcgcaggtaagaggtgctggtggcaccgaagcgccagtcaccaaagtgggcggacaggtcgctgaccagcgagatctgcgggtagcccggctgcgcgttgcccttgatcgggtacaccgtgtcgcccaccacgaaatcgctgtcgtagtacgaacgggccacggccacgccctgatagaactgcaggtggtcagtcaggtcggcggtgatgccgaggtcggcgccgatcacgtgcatcttcggcatcagccgcacggtgttgatctgcgcgaactgggtaccgatggcggccgacagcaagcggttgcggatgtcgttgtagaacacgtcgccggtgatcgtcagccggtcgaaacgatgcgatgcgcccacggtgaggttccagttcttctccggccgcagcgtacccgccacgcggtcgaactcctcctggtcggtgatggtccacgccgaggcggtgtagccgatgttgccgcgctgggccacgcggtagccgttcatggtattggccaggtcgatgaaggcatcggtggattcggtcgggctccagaacagcgagacatgcggcaggaagttgctcttcgcgcgcagcgtgccgttcaccggccggtccttggcgtcaccgaggccgccgccgcgggtgcggaagtccacggccttgaagccgacacccagcttcagcgtgtcgttcagcacgatgtcgtcctgcaggtagaactggcgcgagcgggtcacccagctcgatgcgttgtcggtcttgaacgcggggccgtacacatcgaacggaccggtggccttcagcggcgggccctcgcccagcagcggctgctggtaccactcggtcttggcagcggccttgctcttctcctgccagaaaccggcggtgaaggtgtgcgcgccggtctcgaactgcaggttgagcatgccgcccagccggttgaggcgcggggtctgcacctgttcggagaacggcgcgccgttgggcgacggcacgttcgggtcggtcagcgtggcctgggtgtggctgttggcgttgtacagctgcacgttgccgctcagcgccggactgatctggaagcggtggttgatcgaggacacgcggtcacgcgtgctctggccggtgtcgtagggaatcagcccggacagttcaccacaggtataggcgccgcaggatttgtctgcgttctccggcgaggccacgtagtacgcccaggcgtagtccgggtagaagatgtcggccttccagcccagcttgctgatcatgtcgaaggaaatgttgttgtaaccccagaccttggccttgctgtcggacaggaacacggtgacatcgccccaggcgacgtcctgctgcagcttcaggtcgccgcgcaggaagttctgcgtgccctcgccctggtacttgtcggcggacacgcgctgcaggtcgaccagcactttcgggccatgctcaccgagctggccgctctgcccggatacggtggtgaccagcgtgctgttgctgcccacgccctgcttcacgcgcaggctgggcgtgtcctgcaggtcgcgcaggcggtattccaggctgccgccgttgacgctgctggagaacacgctgaccggtgcgccaccggggctgaccgtgatcgcgccgatgccatcgggcacgcccacgttcaccacgctggtgccggtaagcgagaggaagccgttgtcattcagcggcacgccttcgaaggtgatgcccatttcgttcatgcggaagccgcgcacgaacaggctggtggcggagatatccaggcccagcccatcggtggcggtatagctcgcgcccggcacctgcttcagcatggccaggccattgttgccggtgaccatcgcgtcgaggtcctcggccttgatgatgtagcggttgggaccgaccacctgggtcggtgccacggccgcgccgcgcggcgtggcgatgacctgcagggcgttgagcgtggtgggcgtgtcgagcgcggcgtcctgcgtttctgcagcgtacgcaggtgcggtgatggccgcgatgatggccagggcgaggcgcgtcgtgggtggggtgttcatggcagtagatccagggtgcagggagagagccgcgcaggcgcacgcccagcgcgttgcagcgccggtgtcggcgccctggctggcgatgcggttgcgttgaaggcgtgacggcgcggtgcgtgccggtcagtggcagacgaagacgatcatctgccgtgggattcggtggggtgatttcgacgtgcggaattcttgcatcgcactgccgcatccgccattgcaccgtggtacagcgccaatggcggtggggatgggtgggttatacgtgggtatagaccctggtcggcgctggccgcctgcgtgtgccaaccaaggttggcacctgccggggcgaatggggcctggtagaggccgaccttggtcggcgcttgccgattgtgtgtgccaaccaaggttggcacctaccagagcatagggacgcgcggttactgcaggacgaaacgctcgatcgcgcgcgccacgccttcgtcggcattgctgctggtctcaaaccgcgccaccgccttcaccgcgtcgatggcattgcccatcgccacgctggtgccggcatactgcagcatggtcaggtcgttctcctggtcgccgatggccatcacgttggcgcggtcgatgcccaggtgctcggccagtctttgcaggctcggccccttgcccgcgcggtggtcgaacacttccaggaagaacggtgcgcttttcaataccgcgaagcgctcggtcagcgcgccgggcaggcgcgcgatggcagcgtccagcacctcgggttcgtcgatcatcatcagcttgatgaaggacatcgacgggtccatgtcttccacgcggcgatacgacagtggcatccgcgaaagatgcgagtcggccacggtgtagtagctgatgtcctggttgggcgtgtacatgcgctggctgtccagcgcctggaagtgcacgcccaggtcgcgggccacctgctcgcagaacaggaagtcgtcgaagctgagcgggtactcgactacggtttcgcgcgtgccgatgcgctgcaccaggccgccattgcaggcgatgcagtagtcgtcgttgccggtgatgccgagctcgtgcaggtacggcgccaggcccggaaccgggcggccactggtcagcacgatgtgcacgcccagtgcgcgcgcctgcgcgatggccttcctggcgcggggggtgagctggtgcgacgggtccagcagcgtgccatccatgtcgatggcgaccagttcgatggtcgattgcctgcggcccatgtccattgcgttcaactcgtgcggggcacgccagtttaccccctcatgcccggttcacctctttgcccacgttggccgggatactgcaggagcctgtgcgtcccccaccgcaggacggcccgctgaccgcccttccctggagaaccttgcgacgcatgacctaccgtgcccccgaaaccaacgacagcgcacccctggcccagcagatcgagcagatgatcgacgagctgcccggcgaccaggtgagcgtcggcaccctgctcagcgcgctgggcgatgagggcctgctgctgatcgtgatcctgctctcggccatcttcatcattccggtgtcgattcccgggctgagcacggtgtttggcgcctcgatcctgctgatcggcctgagccgggtgcgcaaccgcccgctgtgggtgccgcagaagctggcgcgccgcgggatcgccaccgaaaagctgaaggccaacctgggccgtgcgctgaaatgggtgcaccgcatggagcggctgtcgcggccgatgcggctggcggtgatggtgcgctcgaagaagatgatgcgcctgaacaacctgatgctggtgtttgcgaccctgctgctgatggcgccggccgggccgattcccttcagcaacacgctgccggcgctggcgctgatgtcgtttgcgattggcttcatccagcgcgatggtgcggcggtggcagccggctacggcttcgtggtggccacggtggtgtacttcggcgtgctgctgggcggcgtgggatttgccgccgaatcggtgttcagcgggttccgcagcagtaccgccgaactgtagagccgagcccatgctcggctgctgttcgctcggtgcacggaaacccgcgcgctgcgcgcgtaagccgagcaagggctcggctctacaaaggccggatccacagcagtcgagcgtggctcgacgctacacagctatttcgccgacacccgccacaccacgtcgcccacgtcgtcggccaccagcagtgcgccctcggcatccatcgccatgcccaccggcgcacccatcagggtcttctcgtccttcgaggtgaagccgctgaccacggtctgcggccgcccggtcggcttgccgtccttgaacggtacgtagaccacttcgtagccactcagtggcgagcggtcccagctgccgtgctcgccgatgaaggcgccgccgtggtactgcgccggcagtgcctggccggtgtagaacaacaggcccagcggtgccacgtgcgagccgatggcatagtccggcacgatcgccttggccaccaggtccggccgctgcggctgcacgcgctcgtccacgtgctggccgtagtagctgtagggccagccgtagaagccatcttccttcaccgaggtgaggtaatccggcaccaggtcggcaccgatctcatcacgctcgttggccacggcccacagctggccagtgctcggctcccagtccagcccggtcgggttgcggatgcccgacgcaaagatgcggctgccacggctagctacgtccacctccagcacgaccgcgcggcgatattcgacggccaggccattttcagtaatgttgctgttggagccgacgcccacgtacagcttgcggccgtcgcggctggccagcagttccttggtccagtggtggttgatggtgctgggcaggtcggtgaactcgcggcccttgtcggacatgcgggtttcgccgggcacgtagtggtactgcatgatgttgccggtgttggccacatacagcgtgtcaccgatcagctggatgccgaatggcgagtgcaggccttcgatgtagacgtgctgggtccaggtgttcgtgcctggcgagcggcgcagcagggtgacccggttgccgcccttgccagccttgcccgagcgcgccttcaccttgccggcgatccactgcttgggtgtggtgaccggctcttcgccggggccattgccttccaccaccagtacatcgccgttgggcagggtcagcagccggcgcgggtgctgcaggttggcggcgatgcgctcgatcttcaggccttcggccaccgtgggggcctggccgtcggcccagcccacgcccttgggcacctgcatcggcggcatcaggaagttggccggcttgggcagtggcggctgcggtcccgactggtcggccggatggtattcggccttgcccgcgcaggccgacagggtgacggccagtgccagcgcggcgacggtgggcaggatgtgcttagccatgacgacctccctgcagcaccggcggctgcaatgacaacaggatcaggcccagggcgatcagggccacggtcagcgccgacaggatcgtgcccggcacagcaacggcatacgcatcgcggctgtgcacgaaggcgttccagatggccagcaccaccgcgaccaggttgaggaagaagtcgatgcggtcgatgcgggtggccgtgccgttgcggcgccagaccgcgaacaggttgatcaggcgcggcacgatggcgatcagcaggccgaacgtgatcagccaagcggcggccttgccccacatcacctcggcgctgttgagatagatcgcgtcgaagatcagtgcaccgacgaagaagccgaacggtatcgggttcaacaggctgaacagcgtggtgccgaggccgcgatgggcctgggcgagcggattgaccatcatcgtgctccgtgcggaagggtgcacgggctgtagtagcacagcgcgatgtgagggcgcgcgatgatgccccggcggcgctgccacacccaccgggcaggcaccgcactacgcgggttcgtcctcgcgcacctcgtggaagggcagcatcgtctcgaagccgaattcgtgttccatgctggtgcggaccaggccgccgatggcgtagcggctggtgtttgcatgcacgtctatgccaccgtgccgccactcggtgcgcagatgcagcgtctctgcgcgtcgcatgacggtccgttcctcctgcagcagcgcgcgccggtgcttcttcatcaacagccgcagcggtttcaccatggtgatgccgaatgcggccagctcgggcagcaactcgctgatatcggcatcgtcgccatagtcgtggctgcgcgtatgcacggatagcaccaccttgcggatggcggcgaccgagagcggggtctggtctgcgcgcgcacgtgcgcgctggcgtccattcttcatgcgtgtcttcacctgcatgtgattaccacgtttccggccctcgaagcagacgcgcgaagatggcgtgaaggcattcgcgcgccctgtcataacctgacgtactaagtgtttgtgacgcaatttgcatattcgtacattgcggatgtgaagaggtagggggttctccgttgtgtcgcgtttggctcgttgcgatggggcagttccgccccgccgtcctgccatgccgattcacaacagaaggattcgtgtatgaagcgacacacgcaacgctccgcgccaccgcgctctgcgcgcctggcccttgccactgccctggtgctgggcagcctggccgtcaccgcccaggcccaacaggccgatccactggcgggaatacagtggcacctgctcaacaccgggcagacggtcccggctgacaccctgccggtggccggcaacgacctgaacgtggatggcctgttccgcaacggcatccgcggccagggcgtcaccatcgccatcgtcgacgatggcctgcagatcgcgcacccggacctggccgccaacgtggccgcggtggccggcaagaacttcatcaacggctcgaacaaccccaccccgaccaacccggatgtcgacaaccacggcaccatggtcggcggcattgctggcgcggtgggcgccaacaacctgggcgtacgcggtgtggcgccggcggcgacgctgaagggcttcaacccgatttcgcgctcagccctgggcaaccagcagagcaacatcgagtacgcctggtgggacggcgcggagtcggccgacgtgcaggtgttcaacaacagctggggcgccggcccgggcaatccgaacctgccgctggcgtacagcgaaaacacgattcgttcgtatgagcaggcactgtcgggtacgcgcggtggccgcggcggcatctacgtgaagtcggcgggcaacaacttcaacaatgcctcgatcagccagacccaggatgtctgcaccaccgacaccaagaaccgcaacaccggctgcgtgccggccggacgcgatccgcgcaacaacctgttcaacgtgatcacggtaggcgcggtgcgtgccgatggcgtgcgctcgtcgtattcctccaccggctcggcgctgtgggtgtcggccttcggcggcgaatacggcctgcaggcccagtacgcccccggcctggtggcacgcgcctacgacccggccatcgtcaccaccgacgtgaccgggtgcgcgcagggcagcaacaagaacaccaaccgccagaacacgctggacagcaacctgtcggccatcgacagcacctgcaactacaccgccaagatgaacggcacctcggcgtcggcgccgatggtctcgggcgtggcggcgctggtgctggaggccaatccgaacctgtcctatcgcgatgtgaagtacatcctggccaccaccgccacccgcaaccacccgaaccagccggcggtgacgctggccgacgggcgcacgctggtgccaggctggacggtgaatgctgccggccgtgcctacagcaactggtatggcttcggcgtggtcaacgctgcacgcgcggtgcaggtggccgagaacttccagtcgctcggtgcgctggtcgacagcggctggcgcaacaccacgcgtaccgtggccatcggcaacacctcggccgccgccgcacgcctgaccttccagttggccaacggcgcgcgcaacatcgaaagcgtgcagctgggcttccgggtcaaccaccgcaacacgcgccagctgcagttcgtgctggtgtcacccagcggtacccgcagcgtggtgcaaccggcgttcaccgcgatcggttcgggcacgggtggcgcgcagagcaacttcaccagctgggacctgctgtccagcaatgccttcctggatgagaacgccacgggcacctggacgctggaagtgaccgacatggggcaggccgcgaccgctgcatcgcgtggcaacctcgaattcttcaagatccgcgttctggggcactgatgatgaagaccaccattctgttgagcacgctcgccttcgcggcgatgaccttccctgcctgggcacagagctcggggcagacccctccggccaggaccctgtcgaccgtggatgctcaggaactgaaggcgtccgctaccggccgctcgttcgatgtgggcggcacgcgtttccagctgtcgccctcggcaacggtaaagcaggccagcggcggccagttcacgatcaccccgcaggcggcggcgaccaccagctcgcgtaccaagcgttcgctggatggtgccgcggcggcgcctgctgatgccggtgccggcaagttcgcggcggcggtctcccgtgacggagcgccggtggtggcgacctcgcgggtcaaggtgttcttcaccgatgcagcatcggcccagcgcgcggctacggccaccggtggcaccgtggtgaaggtctccaaggcgtcgggccaggcgatcgtggagtacccgtcggtgaacgcggcactggatgcgaccaccaggctgctgtccaccgccggtatccgcgccaccgagccggacgtggtgcagtgggaagagaccaagtaaggcgttgagcggtgccccggccggctggctctcctggccggccggggattggtgtggggggtgcgccgaccaaggtcgacacctgccggggccgcgcgcgtgtagagccgagccgatgctcggctgctgtctacggggtgccgcaggcgcggtgcgcgcggcgccgagcatgggctcggctctacagctgtgccaaccaaggttggcatctaccaggagcagattcggacgtgccaaccaaggttggcacccaccggcgttaccgcgcggcgagtgtgccgctgtgcttgaggtggcagctggccagcgcgtcgttgccggcggccgggtggccgggctcgagcagcaggcgctgcacgtccgagaacagcttttccaccggcatgccgtacggcgcgaacaggcgcaggcggccctggcggtcgaacacgtagccgccggcaatgtggctcatggtgtaggtatccggtacctgaccgggttccttttcgtagaacgccttgaagtcgctggccatcgcggccagctgcgcatcgttgccaaccagcgcgattgccttgggatcgaacgcttccacataggtgcgcgcgacctcgggcgtgtcgcgggccgggtcgacgctgacgaacaccacctgcagctgatcggcatccttgcccatcaggtgcttgacctggctcagctcgaccatcgtggtcgggcacacgtccgggcagctggtgaagccgaagaacagataggtcacctgcccctgcaggtccttcgggccgcgcacggtgccgtggctgtcgggcatcgaccactgctggccgagttcttcgcaggcgatgtccttcgcatagaagtccatgcgcgactgcgcgctgcagccagccagcaggccgagcagcaggcctgcggccaggcgcaggccacgatgggggaacgcaatgcctttcacggttcgcaggctcagttgatcatcatgtggtagtgcatgctccagatgatccagaccgacaacgcgacgacgatgaacaggatcaccagggtgaacacgaagctggccaggttccagccaccttcggacttgcggtccatgtgcaggaaatagaccagctgcaccaggatctgcgccaccgcgaagccgaccagcaggaacagcgtgagcggccgcgacagcaccgggttcatcaccagtgcgaacggcaccacggtcagcagcgcgcacagcacgaagccgatcaggtaggacttggtggagccgtgcgcattgccggcgcgcgaggttttgacgtgggccatgtcagaaggctccgatcaggtagacgaaggtgaagacgcagatccacaccaggtccaggaagtgccagaacaggctcaggcacgacacgcgcgtgatgttggtcggggtcaggccacggcggtagacctggtgcatgaccaccgccatccagatcaggccgctggccacgtgcaggccgtgggtggcgaccagcgcgaagaacgccgacaggtaggcactggtgctcggacctgcgccttcgtggatcaggtgcgagaactcgtagatctccatgccgatgaacgaggcaccgagcacgaaggtcacgcccagccagcgcagcaccgccgaggcatcgtggcgatgcatcgccagcacggcctggccgtaggtgatgctggagaccagcagcaggaaggtctcggccatcacgaacggcaacgagaacaggtccttgccggtggggccgccggcgtaggcggtgctgagcaccgcgtacgaggcgaacagggaaccgaacagcaccaggtcggacatgaggtacacccacatgccgaacaccttcatgccgccctgttcgtggccatggtcgtgctcgtggtggtcctcgtgcgcctgcgtgtcgctggccagctccgggcgggtcaacaggttcatgcgcgtacctccttcagcttggcaaggttggccgcttcggtgcgcgccacctcttcggaactgacgtagtaatccacgtcctcatcgtaggaccgcacgatcagggtcacgatcatcgcgatgaagctggctgcggccatccaccagatgtgccagaccagggcgaagcacagcaccaggatccagatgttgaggatcagcggcacgccggtgttcttcggcatgtggatcggggcgtacgtcttcggcggcggcggcaggctgcgcttcttcgcttcgtggaaggcatccagctcatcggccttgggcaccacggcgaagttgtagaacggcggcggcgacggcgtggcccattccagcgtgcgtgcgttccacgggtcgccggtcaggtcgcggttgcgcttgcggtcgcgcacgctcacgtagatctgcaccagcatcaggatgatgcccgcgaacacgaacagtgcaccgatgaaggcggcgatcaggtacggcgtccacgccgggttgtcgtactggttcatgcggcgggtcatgcccatgaagcccagcatgtacagcggcatgaaggccaggtagaagccgatcacccagcaggcgaacgaccacttgcccaggcgctcgttgagggtgaagccgaacaccttcgggaaccagtaggcgaagccggccaggtagccgaacagcgcgccgccgatgatggtgttatggaagtgggcgaccaggaacaggctgttgtgcagcaggaagtccgcgcccgggatggccagcagcacgccggtcatgccaccgatggtgaaggtgaccaggaaggcgatggtccacagcatcggtacgctgaactcgacgcggccgccgtacatggtgaacagccaggtaaagatcttcacgccggtggggatggcgatgatcatcgtcatgatgccgaagaaggcattgacgctggcacccgagcccatggtgaagaagtggtgcagccagacgatgaacgacaggatgccgatcgccagcgtggcgcccaccatcgacttgtagccgaacagcttcttgcgcgcgaacgtggcggtgacttcagagaagatgccgaacgccggcagcaccaggatgtacacctccgggtggccccaggcccacaccaggttcacgtacatcatcgggttgccacccaacgtgttggtgtagaagttgaagtccaggtagcggtccagggtgagcgcacccagcgccacggtcaggatcgggaaggcggcgatgatgatcacgctggtgaccagcacggtccaggtgaacaccggcatcttcatcagggtcatgcccggcgcacgcatgcgcaggatggtgatgaacaggttgacgccggtcagcaatgtgccgatgcccgaggcctgcaacgcccagatgtagtagtccacgcctacgcccggactgaactcgatgcccgacagcggcggataggcgacccagccggtcatggcgaattcgccaacgcccagcgagatcatcatcagcgcagcgccaaccacgaagatccagaagctgaaggcgttgaggaacgggaacgccatgtcgcgtgcgccgatctgcagcggcacgatgatgttcatcaggccgaccacgaacggggtggccacgaagaagatcatgatcacgccatgcgcggtgaagatctggtcgtagtgctccggtggcaggaagccatcactgcctggcccggccgcggccaactgcgcgcgcatcatcagcgcgtcggcgaagccacgcaccagcatgaccagcgccactaccacgtacatgatgccgatcttcttgtggtccacggtggtgaaccagtcgcgccagagcacgccccatagcttgaagtacgtcaccgcgccaagcagcgcgaggccacccagccccatggccgccagcgtgaccacgacgatcggctcgtgcagcggcacggcctcccacgtcaatttacccaacatgttcgttactcctgggaaacctgggcaccaccggcagcacccgccggggacgcagcagcggtgttctcaccgacgccgatgaactggtcgatgaccttcttgaacagcagcggttcgacgctggagaagtgctgcaccggcgcgttcttcgacggtgcggccagcgccttgaactggttgaagtccagcgcctgtggtgcgctgcgtacctcggccacccagcgctcgaactcctcgttgctgctggcggtggcaatgaacttcatgttcgagaagccatgcccgctgtagttgccggacatgccacggaactggccgggctcgttggcgatcaggtgcagctgcgtgcgcatgccggccatcgcgtagatctgcccacccagctgcgggatgaagaaggtattcatcgtcgagttggaggtgatgttgaacgccagcgggcggttggccgggaagttgagctggttgaccgtggcgatgcccaggtccgggtatacgaacacccatttccagtcggtggcgatcacgtccacgtgcagcggctcaccggccacgtccagcggcttgtacgggtccagttcgtgggtcgacttccacacgatcacggccaggccggcaatgatcagcagcggcacgccccagaccacgatctccaccttggtggagtgcgaccagtccggcgtgtatttcgccttggtgttgccggcgcggaagcgccaggcgaatacgaaggtcagcacgatggccggtatcaccacgatcagcatcaggccgatgcagatcaggatcaggtcgcgctgggcgagcccgaccatgcccttcgaatccagcagcacccagtcacagcccgacaggccgacgcaggccagggcgaccagcgccaggcggatgcggttccagcagatattcattggaggtcaaccctgttgaagaagcgcgcttgaccggctcgcctgcgcgcagcgcccgggcgtggagcggctacactgtgggtacgaggtcgcctacaagagagcgatccactccaatcaagcccatacaagatacatcattgtatggacttgtgcatctgcacgtatggaaaaactgaccgatgacgccacctgccgccggccgccgcctgaaacaccccaatcgcacctgggttcgccccttccgcgagggcgctggcccgctgtacctgcagatcgcccagcaggtgcgcgaggcagtggatgacggcgtgctgcgtccgggcgaccggctgccgccgcagcgcgacctggcccagcaggtgggcgtggacctgaccacggtcacccgggcctttgccgagctgcgccaggctggcctgctggatgcgcagggcgccggcggcaccttcatcgcgctgtcggccggcaaccgcagcacctcggtggacctgagcatgaacatcccgccgctgctgggcagcgcgccgttcgcacagggcatggaggccggtttccagcacgtgggccagcagctgggccagggcgaactgatgagctaccacgtcggcgccggcacccgcgaggaccgcgccgccgccgtgcagtggctgtcaccggtgctgggcacggtgggtgccgaccaggtggtgatctgccccggcgcgcagaccgcactgtgcgcactgatcctggcccgcacccagccgggcgagctgatcgccgccgagcaactgacctacccgggcctgctggccgccgcgcgcgtgctgcagcggggtgtggtgccagtggcaatggacgccgaaggcatgctgcccgacgcgctggaagaggcctgccagctacgccgcccgcgcctgctgtacttggtaccgaccatccagaacccgaccacggcgacgatgtcggcacaacgccggcaggccctgctggcggtcgcgaaacgccacgatctgaccgtgatcgaagacgatccctactggttgctggccggggacgccgcaccgccgctggccgcccaccgcgacgccggctgcccggtgtattacatctccaccctgtccaagtgcctggcaccgggcctgcgcaccgcctacctggtggtgccgggcggcgaaccgatggaaccggtgctggacgccctgcgtgcgatcgcgctgatgccgacccagtcaatggtggcggtggcgtcgcagtggatccgcagcggccaggcccaggacatggtgcagcgcttccagcaggagctgcgcgagcgccaggcgattgccgcgcagtacctgccgtcccgcgcgcgggcgcacccggccggcctgcacgtatggctgccgctaccgccgcggctggaccagtaccggctgatccaggccgcacaggaacaggggctcggcatcgccagttcggacgccttcagcgtggaggaaccgccaccgggcaacgccatccgcctgtcgctgggcggcgcagttgaccaggatgcgctggccggggcgctggccaaactgaacgagatcctgtctgaggcccccggggcccggcacaacgccatcgtctgaaccgggcgcatggcgccgcatccatacaagatgatattttgtatgcaatgtatggatgaagggacgtgcgtcgatgcgcgccgagagactgaagttccacctggtaatggccggctgtggtggctttgtggtgttgatgctggctgcgctggcctgggtctgcctgcagccgcagaccgtggatgtgcaggccgccgagcgccacgccatcgagcaatgcgtgcagcgcagcgaggatccgtcgcgtagcgagatccagcgtcgcgcgcaggccgactcctgccgcgagatgcgcaagcagtacgtgcacaagttcggcggggacgcgtcctgatgggcgcagccgcgccgcgccgccgctggctgctgccgacgatgatcgccctcgcctgcctgttcatggccggcgtggcggctgcgctgtggcagtacttcggctacagcgcgcagtcgacgttcaccgaacaggccatcgtcttcgacgactcgcagctgcgcctgccgtccgatctggccggcgataccggccgcatccgcgtggtgcacttctgggacccggcgtgtgccgtctgcaaccgcgaaaccggcgcacacctgagctacctgatcagcatgtaccgccgcgccggcatcgacttctatgcgatccgccgccccggtacccagggcgaactgcctgagccgctgcgcaacaaggtgatcaacctgccgaccatcgacggcatcgaacacatcccggccagccctgccgtggcgatctgggaccggcagggccacctcgccgatgccggcccgtacagcatcggcatggtctgcaactcggccaacagcttcgtcgaaccactgctggacagactggtgcgcggcgaaaccgtgcgcccgaaaggactgcttgccgtgggctgctactgcccctggcaggccaagcgctgaggacgcgcaatgacaccactgacgctggccgctgtggccgccacaagcaacaacggcggtcacctgtccgaaccgaccgatggttatggacaggctcccgccgttggaagcaacgatacgccccgacatgctccgtacatgccgcgaccggatgtcgcagcccgcgaatgggtgcaggacgtgctcgcgcacaacgggccgatctacctgcgcatcgtcaattcgctggagcgcacggtgcgtcgcggtgggcttgcaccaggacaacgcctgccctcgcagcgtgcgttggcgcagcagctcggcgtcgacctgaccacggtaacgcgggcgttcgacgaagcgcgcaagcgcggcctgatcgaggcgcgcgggccacaaggcagtttcatcgcaccacccaaggccggcttcgaccaggtggtggacctgagcatgaacgtgccgccggtgcccgatgccgatgcgctggccgaaaccctgcgccgcggtgccgccgccgtgcttgcgcgcagcaacgcgccgaacctgatgacctaccacctgggcggcggcaatcccaccgaccgccacgcggcagcgcgctggctgcaaccgatgctgggcgcggtggaggatgccagcctgttgctgaccgaaggcgcgcaggtggcgcttgccgcgatcctggtcagccagggccgcgacgatgatgcgatcctctgcgatgcgctggtctatccgggcctgctgcaggccgccgccgcactgggccggcggctgctgccggtggacagcgacgaacacggcatgtgccccgatgcgctggcccggctggcacgcgaaagcggcgcgcggttggtctatctcaaccccacctgccagaacccgaccgcgctgagcctgccgctgcagcggcgcgaagcgctggcgcgtgttctggagagggaaggcctgctggcgatcgaagacgatccttactggcacctcgccgaggatgcacagacaccgctggcggcgctggcaccgcgccatgtgttctacgtggcgacgctgtcgaaggtgatcagccccggcctgcgcactgcgttcgtgcagtgcccaagcgctgcgcacgccgaggcgatggcttcggccttgcgcgccacccggttgatggggcatccgctggtggcggcgctggccagccagctgctgctggatggttcggcgcaatcgctgctggcgcaggtgcgcagcgaagcgcacgagcgcatgcgcatggcgcgctacctgctggcgccttcgctgctgctgcgcgccgaaggcctgcatgcctggtgccgggtaccagcgccatggactgacgccaccctggtgcgtaccgcacagctgcaggggctggcgatcgcgccctcatcggcgttctgcccgccgggggtgcagcatcagaacggcgtgcggctgtcgctggggctggcggccgatcgccggcagctggaaagtgcgctgcaacggattgaccggttgttgttgtcggacgcgttgccggcgatcgagcggtagccctggaatgggatgtgccgaccaacggtcggcacccacccgaccggtagtgccggccgctggccggcggaagattcctcagcacggttggaatgtgccgaccaacggtcggcacccacccgaccgatagtgccggccgctggccggcggaagattcctcagcacggttggaatgtgccaaccaacagttggcacccacccgaccggtagtgccggccgctggccggcggaagattcctcagcacggttggaatgtgccaaccaaggttggcacccacccgatcggtagcgccggccgctggccggcggaagattccccggcacggttggaatgtgccaaccaaggttggcacccaccaaagcagggtcaggccaaggcggagagggccttcaccagcgcatccatctgctgcggccgggtgaacaccgacggcgtcacccgcacgcaggcgccggagtccaagccgtcgcgatgggtggtgaacacgcgatgctcatccaacaggcgcttctgcagcgcgatgttgtcagccacgctggtgcgcccgctcaggcggaagctggccaatgcactcgccaacgccggatccggcgaagacagcacttcgatgtgcgccatctgccgcgccggcagcgtccagcgctcgcgcaggtaacgcaggcgcgcctgcttgttgtccgcaccgatgcgctggtgcagggcaatcgcctccggaagtgccaggtaagcggcgaagttgaccgtgccggtgtgtacgcggctgcccacgcggccgtcgtcggtctcgcccatgtacgggtcgaggtccgcaacgcggcccctgcgcacgtacatcgcgccgacaccgaccggtgcgccgatccacttgtgcaggttgatgccgacgaaatcggccttgagctgcggcaccgcgtagtcgatctggccgaacccgtgcgccgcatcgacgatcacgtcgataccgcgtgcgcgtgcacgctcggcgatctcggccaccggcagcaccagcccatggcgatggctgacctgggtcagcagcaccagcttcaggcgtggcagccgcgcgaacgcggcctcgtaggcctgcaggatctgcgcatggtcgggcaccaccggcagcgcgatgcgctcgacctgcacgccacggcgctgctgcagccaacgcatcgcaccgatcatgctgtcgtagtcgatgtcggcgtacagcacctggtcgccgggccgcaggcggttgtagccaccgatcagcgccagcatcgcttcggtggcgccacgggtcagtgcgatctcgtcggcgcccacgcccagcagttcggccacctgccgctgcaccgccatgtactgcgccgggaactcatgacggccgtaccaggcgttgccacggttcacctcggcggtgtggcgctggtagctggccagcgtctcgcggcccatcgcgccccagtagccgttctccaggtggttcacttcatcggtgatgtcgaagtggctggccacggcggcccagtagccttcatcgcgggccagcgcgtccggcgctacggtcgttgcgggaatctgcatgggcgcagcgtaacccgcggcagccatggcgggcagtgaagacagcgcagctgcagccggcaacagtgcaccggcacgcaacaggacgcggcggttgcggtccatcagaagctcagccggtactgtgcgtacaggttggcaccgtcggtgtcgtacggcgcgttgcgcgagtagaccaggccgcgactggcctggaaggtggcttcgtccggatagcggtcgaacacgttgtcggcacccacgcgcaggctgtgatgttcgttgatgcgatagccgacggccaggtcgaggaagctcatcgcaccaaagcgctggtagatatcgcccaccgcattgccgctggaatcggtccaggcaccgtagtagcgcatgcgcgccatcagcgaccaggcaccgatgtcccagctgccggtcaggctgcccttgtgctcgggcaggcggtcttcgaacagcacgcgctgggtctcgttggttgccaccgaggtgctgccgttgtccacgcgggtgcggttgtagttgtaggccagggtcagcgtcatgcggcccgcgccgaggtcgcgcaggtagttgccgaccacgtccacgccggtggtggtggtgtcgaagtcgttggtgaagtagttcaccgaggtatagcccagcggattgggcgtaccggccggaatggcgaaactggccgactggctgaagcggtcggtgagcttgatctggtagacatccaccgagccggacaggcccaggtcggtgcgccaggtcaggcccagcgatgcggtacgcgattcttccggcttcaacggcctggcaccgagcagctgcgccagcggatcgttcggcgacaggcggccgctggtgaagatctgcagcgtgcgcgtatccaacccctgggtggtgctggtggtgttgagctgcgccggcgtcggcgcgcggaagccggtggacacggtgccgcgcagggcgacgtccggggtgatcgcgaagcgcgccgacagtttgccgtccagtgtgctgccgaagctggagaagtcctcatagcggctggctgcaccgatgctccagcgctcgcccagcggcacttccatgtccacgtaggcggccttgctgcgctggctccactgcccggcctggctggccgagaagcccggcgcgccattggagttggcctccaggcccgcggccgcgcccggacccaccgcgtacgaggccggatcaccggcgcgcacctggtaggtttcctggcggaactcgccaccgaaggcgacgttgatcggcttggacagcgcagccacgtcccattcgtagttgaagtcggcgttggcgttcttctcggtctgggtcaggcggccgagatcgaagtcggtcgggctggccgggccgagcgaggcgttgatcgagttcttcaggcgatagtcgatggcgttgcggccatacgaggcgctgacatcccagcgcagcttcggcgtgatctcgccgcgcaggccaccgaccagctgcaggtcgttctgcacgttgccgtactgcgggctgaagccgaccggatacagcgagcgcaggttccagcccgggaagatggcggtggtgcggtacgcgccggtggtggtgtccgggttgcgccagttgaaatcgctgacgccattgctgtggctgtacaggccaaaggcatagagctccagcgtatcgctggcgttggcctttacgttgaagccgacgcggcggctttccagttccggctggccccagcgctgcaccgggttgggcacctccagctccggatgcgcggcctggtaggcgatggcatcggggcgctggcgggtgcgcgaggtggcgtcggaggtggacgattcggcgaacagcaccaggctgccatagtcgcccagcgaccagccggtgcgcgcactgaaatcgcgcgaagcgccgtcgccctgcgcgtactgcgagtagccggcggtgatctcgctacccggcccatcctccaggatgatgttgatgacgccggcgatggcgtccgagccgtactgcgccgacgcgccatcacgcagcacctcgatgcgcttgatcgcgctggttggaatctgtgccagatcagcggcctgtgcaccacggttgccgagcagcgcgctgcggtggaagcggcgaccgttgaccagcaccagggtctggtccggcgacaggccacgcagcgtcgccggacgcacgaacacctggccgtccgccatcggcaggcgctgcaccacgaacgacggcaccagctgggccagcacgtccttcaggtcggtggattcgacggacctgatgtcttccttgctgaacacatccaccggcgccagcgtttcgaactgggtgcggttggacgcgcgggtaccggtgaccagcatcgcgtcgagctgggtgggcgcggcgcggctgccgccggcggcatcgaccgcatcggcctccgttgcgatcgcgcctcctgcgctggccatggaaagggcaaggaggatggaacgcgaaagcttcgaacgatgcacggcagggctccgggaggacgcgacagggccagcacctgtgcgcacacaacaggcctggacaaggcgcgcagtctcggcgcgatgtgtgaaggaggcatgacgtcagtacgacagcttgatgcgccaaccaaggttggcccctgccagggctcatccgtagatccacgccatgcatgggtggcaatgcagacccacgtcccatccccgcacacagcggctagccgttggcgtcgtcgccaaagccgaaacgggctggccgtgccgttcgcagcggaacgaacatcatggcagcgaacaccaccaaggcgggggtggacatgatccagatgcccctgttgcgaatcccgatccccatgaagtcgacctgcagatcgccgatccattgcagctgcgtcagtatcatcaccagcccgccgatagtcgcgcacggcaacccaccgtgaccggcccccaacaacgtcggtgtcagaaacccgcccagcaacgcgaagccgacacggtacacccagggattgccgcgccaccgtggtgcgccgaacaacatcagcagcatcagcgccagggtcaacagactgggaagtacccagagggcaagcagcatttcgatcatctcgatcatcgtccgggctccgctggcctggcatcccccgtcgtcgatcgcatctccctgccccccatcacgtccatgaagcgcgcattgttgccggtacgcaggcagacgcaaagccccggcagcgcaagaactgctaaacgccgtgcctgccgatccgctactgtgccggcattggatgcggggaacggcaggatgagcgcggcaggcaaggcgttgtggtacatcgaaacccatgcggaccagccattggcgctggccgacatcgccgctgcggccggcctgtcgccgtttcatctgtcacgcctgttccaggcccgcaccggcacctcggtggtgcgctacctgcgcgggcgccgcctgaccgctgccgcgcagcggttggccaacggcgcgggcgacatcctgcaggtggcgctgggggccggctacaccacccatgctgcctttacccgtgccttcagcgaacagttcgggcagacaccggaacgggtacgcgaacagggcaccgatgggctgacgctggtgcaggcgatccgcctgcacgaggccccgtcagcctgcattgaagccccccggctgctcgatacgcccgcgttccaggtggcaggcgtcggcatgcggcatacccgcgacagcagcggcgcgattccgggccaatgggcccagctcaaccgcgagtggccgacgccggcaccggtcagcttcggcgtgtgctgcaacagtgatgacgatggtggcttcgactacattgcggcactaccggcaagcgcggtgccgagcgtgcctgcgcactggcgacgcgtggacatcccggcgcgccgctacctggtggcttggcacggcggacacatctcggccatccgctctacctggttctggttgctggatcactacctgcccggctccggcctcagcctggccgatgcacccgatctggaacgctacgacctgcgtttcgatgagcacagcggcaacggcggcgtggagatctggctgccggtggaagaacgtccccactgacaaggagttgaagatgcgcatgaccgctgctgtgctgggaggaatgctgctggcgttcgcgagcgtcggcgccgcccgcgaaagcggcgtcgccggcgagcgccacggcacgacgacgctggccagcgccgccgtgcgcgacgcagggcaccgcgacgcgctgcgctacacggcctggtatccggcacaggccggcagccgcgaaaacgcgctgaccatcggtcctcccgacgcgccgctgttcgacgccggccggtcggccaaggatgcgccggtcgcgggtgatcgcctgccgaccctgctgctctcgcatggcaacggcggcagcgcgcgcatgatgggttggctgggcacggcgctggcgcgggccgggtatctggtgattgcggtggatcatccaggcaacaacggcgttgacaccatgaccctgcccggcagccttctgacctggttgcgcgccgatgacctgcgtgccgcactggcggccgtgcaagctgatccggtgctgggcccgcatgtcgatcctgagcgcctgggggtcgccggcttctcggccggtggctacaccgcgctgctggcagccggtgcgcgaccggacctgcagcgattgcgggacttctgcaccgcacatccggatgacggcgtctgccggccccaacaggaggcggcaacgcacacgatggaggcgcgcgttgccgctgcggcgtcgcccgaactgtcgccatggatgtcccacgccaacgacgcacgcgccattcccggcgtgcgcgcggtgttcctgctggcgccggcaatcgtgcaggcctttgcgcccgagcagctctcctcgctgaaacagccggtgtcgatcgtgctgggccaggcggacacggtcgcgccaccacagaccaatggcgaggctgcgcgtgcggtgattgcgggcgctgcactgcaggtgctgcccggtgtcggccattacgatttcctcgccgcatgcaccccggccggacaacagcggctgcaggacctgtgcagcacatcggtgccgaaggcgcagacccacgcgcaggcagcggacgcggcaatacggttcttcaaccattcgctgcgctagtggccgccgggcatcgcccggcgctacagtgggcgcgtccacggagaatcgatcatgcgcctgctgcacctcactctgccggtatccgacgtcgcttccgtggccacatatttccacgatgtgctgcagcagcgcgtggtcggcaaccatgtgcacgtcggctggagcaccctcgaacttcagcctgcggcgggacgtccggtgggtggcgtgcatctggccttcaacgtgccggacaaccgcttcagcgaggcaatgacgtggttgcgtgagcgcacgccgctgcagcgcaatccggcggggctggactacttcgcgctggagagcagctggcagtcgcagtcggtgtacttcaccggcccggacggcctgatccttgaactgatcggccgccgccgcctgccggccagcgctcgcgaaggcgtgttccatggcagcgagctgacctgcctgagcgaagtcggcctgcccagccgcgatgtcgaggccgtacgcgaactgtccaaccaacgtttcggcctgcagccgatcagcccggcttcgccgcagttcgcaccgatgggcgacgacgagggcctgttgatcgtggtcgcggccgatcgacggtggtttcccgagcagaaggacctgcccaatgcgcaggggctgttgctgcaggtcggcgacgtggctggccccggtgtcgtggaggacgttgtgctcggctggcgggtacaggcagcctgaactaccagctgcccgacgcaccacctccgccgctgcggccgccgcctccggaccagctgctggagctgctcgcagacgaacttgatgacggggagctggacgcaccgcggtggccgacggatgatctgcggctgccgcgtgccttctcaccgggcagcatggtgaaaatccaggcgaagtacagcacgagcgtgccggcactccacccgatcgtcgcggcaaggcgtgccaccgggtcggcgcgatcaatggccagcagtgcgaagagcacgtagccagcggtcagcagcaagagcactgcgaacctcaccccgaagctgcggcggtccttgtgccagcgcgcgcggcacgcctgcacgaggaagaacagcagcatggctacgatgcctgccgccaggtccagcaacgtgtgcagggccagactgggcggcaactggccacgcagcatcatcatcaccaagaaccccgaactgaccccgagcatgccgagcagcaccacgcgcacacctcggctgcggcgccagcaccagccaagcaggctcgccaccggtacgcacaacgccaatacgaggcagaccgctgccaatgcctggcgtggcgcccacatagccgccgacagcagacccgcggctaccacagccgtcaccagcagcgggcgaccccaggccggcaatcgcttcgggcgcgcctgcggcgtggtgacctcgcgtggcgctccacgctggcgctcgcggtgcctgcgtacgaggtcgtccggcatcctggccgcgggcgccgagggcggtgagcgccacagacccgcaaggaagccggccagcagcgtcattgcaaccacggaatccgcgctgcgccaatcggccggcaacacgttgcgcatcgatggcgcttcccaggccggcaggtcctcgccatcgatcagcgcgaccacgaccttcgttccatccagcaggccctggtcaaggtcgccatcgcggaaacgcggcacgatcgccttgtcgatgatgcgggcggcataggcatctggaatcgcgccctccagaccgtaaccggtctggatgcgtacacggcggtcctgcacggccacgagcagcagcacgccatcgtcaacgccttcccggcccagctgccactggtcgaacacccgctgtgcgtaggcctcgatgccctcgtcgccagcatggtcgaccaccagcacctgcagctgcgcgccggtgcgcgcctgcaacttgaaggcctgcgtgcgcagtatgtcgcgggtatccgccgaaagtgcgttggcggcgtccaccaccgggtcatccagcgcagggaccgcagcaccggccatcaccctcatcggcaacaggcacaacagcatcaacagccatgccgtgacccgggtgcacgtcgtcctgcgcagcatcttcacgtgccctgccctgcctcgatccgcgcatgcagcgcctgcagctgcgcgaccgcctggttgaacacctgcagatcggcatcaaccagcgccggccagtcgggcgcgtgccccagcaactgcgccacctgctcggtcggcgcacgatcaaagccttcacccagcaccgcgagatagcgttcacggaaccctgccgggtcgcgttgatcctgcacgaacagctgcacggccagcagccctgcatagaggtagttcaccagatagttggggtcgtcatacatcaggcgcttgccgatccagccgttgcacagctgcggatagcgctccgggtcctgaccgaagcgctccagcacccggccggtcaacgcgtccaggtcatcggcggtacccagcgtgttgtccgccacgccctcgtagatcgactgctccagctgcgcctcttcggaagacgtgaacagctgcagcaccatatcgtccagcagtgacttcaggtaataggccttggcccgcgggtcctctgcctgctggtacagctggtcgcggaagcgcagttcgttgtagatggcaaaggcctcggtcagccactggctgccattgcgctgcagcggcgaggcatggccgcgctgcatccactcaccgtgcatggcatgaccggcttcatgggcgatctcgacatcgctttccagatcaccacggcgcacgccaacgaacagcattgccggcacgccgggagcgcttaccgagaacgcgtcctggctgcggtcaccacgttcggtgaccagatccatgcgccggttggccggatcgagcagcgcacgcagctcactgacgtatgccggccccaggtgctgcatggcatcggcggcattgtcgcgcagctgcgccagcgtcagtaccggcggcatatagccggcatcgggcaacgtggtatcccagagctgcggcgcatcgatgcctgaacgcgcggcgtggcgcagcagcatgtcctggtaggcgcgacggtcccgtgcatggcgttcgatcgcctgcagcgtagcatccaccgccgatgcatccaggcccatgcgctggtagccccgcgccggtgcagaaccatcgccctgcaggcgcgcggcggcatcgttcacctgcaccaggcccagaagcaccgaggccatcggctcgcggcgcgagtgcaggccctgccagtaacccttccagcccgcttcccgcaacgcgcggtcccgctgctgggccagtgcctgcttgtcgtgcccggtgtcccagtgccgaccatcacgctcgatctgcgggtactcggcactgcgcaggatctgcccacgcagccgtgcgaaactgtccagcgccggatcggccagggcctccacggcctcatccagtgcggtactggccggtgctgcggcgtccttcagcgcacgcgcgcgcaggaaggcatacggtgctgcccacgccgcgtctgcgggcgcttcgcgcagcgccgcgcggccggtgtgggcgatgcggctgcacagccccatcacctggtccagcgcctgcgtcgggcgatggtcacgggcgttgcgtgcggcctgcagatgcagatagctgtgatggcgcaggcactgcgcctgcagtgcctcggcctgatggaagcgttgcgcaggtgcaagcgcggaagcctgctgcagggcctcgacacgcttgcccagctcgccgcgcgcggcctgttcggctgccgcactggcgaagtaggcgctatcgtcggccggcagcgactgcgcctggacgccggtgaagggtgccattgccagcatgacagtcatggtggcggtgatggtgcacatcctgcgagcctgcatcggcgtctccctgcctggatcaggctccgagcctagcagcccccgcccggccgcgcctgtgccgggacaggcatcagatcgactcatcctcgcgcttgaccagcgtccagcagggcgactgcgcgaaggtgtaggtctgctggtcgctgctgtccggcgtgcggatctgtacctgtcgttgcccatcggccagcgtgctgacctgcatctcgcggccctgcccggccaacgcggcgggatcgggcatcaccggccactcgacatcggccagcgccaggcggctttccaccttgcgcggttccggctcggcctcggcatcgatgtagctgtccagcagcggatcggcggtggccttttcctgcagcgcgatctcgttgccgaagtgcttcaggaacgcatcgaactgcgagtaggggcattcaccgctggcaggcaccggtgcgggctggaccgctgccgccgtggacgacggcgcgggatgtgcaggcgccacttccgtgggcgtcacctgggcctcgggcgtgcaggcaaccagggccacgccacaggcaagcatcagcacggcagcggaacggtttcgacgcatgggctcatcctgaatccggttgggtcgtcccatgctaccgcgcgccctacaattccggcactccgcctgtccgagactctccatgcgtcgcctcctgctcatgatcggcctgctgttgcccgccctgtggccagcgctggcgatggccgtcgatgtccacgaaggcgatctgctgttcgtcaccgccggccgcagcggcctcagtgcggccatcgacgatgccaccggcaagcagggcgcgcccagcttcgatcatgtggccctggtcgctgtggcgccaaacggctgggaggtactgcatgcggacgaaaagggatcgcgtcggcaatcgctggtcgagttccgccagagcgcccgggccaagcagcggcagatcgtggtctatcgcctgcgggcaccgcagcaggcggcgatcaaggatgcggtcgccaccgcgcgcatgatgctgggcaagccgtacaacacgtcgtatgtgttgaacgaggacagctactactgttccgacttcatcgagcgtgcgttccgtgcgcaccatgtgttcgcgctgcagccgatgaacttccgcaatccgcagaccgggcagatcgcacagcattgggtcgatctgtaccgcggcatgggcatggaggtgccgcaggatcagcccggcaccaatcccaatgacatgtcggccgcgccggtgctgcaacgcatcggcgtgctggaataagcgaagccccgcgcgcggcggggcttcgggggttgcccagggtgggtaccgacgtcactcttcctcgtcctgcccaccttgctgctgattgcgctggttgcgctgctgctgttcctgctgctgttgctgctgctggtcgcggccacggccctgctgctgatcctgctggttctgctggccctgctgcttctggttcgggttctggttctgctgtgccatgtccgatctccaaagccacgcgcggaatgcggtggacggggccatcgtctgcagcgaggagttaatcgcgcgttggcggacagctacacctgtgtgtacgcgcgtgaatgaacacgcgaaagtccttgcggcacaagccgctgaaggattcatgcgggttcggcatgtccttatgtggtaatgacaggagcacgtattcagtgctgtagggcgcaccggaatgcgcgagcgttcgctcaagaatggctacccgaagccgataggctgcggacgggctgctatggacggcccatctttccaagcatcaacaaggaacgtctaaatgaacgccgtggttgcagaagcaagtgactctcgcctcctcaaagcggtcgagagcatcgcgatcagtcccgcagacgcgaaggccctcgtcacccagtacaggcgccagattctctcccgggatccaacacgcggccagcacgaggttgcagggttggtggccgacaagatcatcagccgttattgccggatgtcagccaccacggggggagcgactgctctgaccggggtcatcccgggaattggtacggccctggcaatggttggcggtggtctcgccgatgcaagcatcagcatgaaactgcaggtcgacatgaccatgtgcttggctgaggcctatggatgggacgtgaatggcgaagacgccaggcacctggcttttctcatcgccgcaggaggttctctggagaagctcggcgtcgaagcgtcgactcggatcgcctcaaatgctggcgtaaagatggtccgtcagtacttgaagggcgccgtgttgcaagctctcaaggaactcttcaagaagatcggcatcacctttacccgcaaggcgctggaaaaagccattccgttcggcatcggagtcgtcatcggctcaggggccaactatgcgttgaccaagtatgttggcaatactgcgcgaagctggttcgaagcggatgccgcactgggcaacaagcccaatgaaatctgagcagcgcgcgttctggccatgcggctttcaaagcaggaagccgcatgatccggggatactggactacggcatcaccggtggtacatacgccagggtcatgcccagcagccacaacaggcccagcaccagcgggatgtgcaccagcaattggatgaaggtgaagcccacgatgtcgcgtgccttcaggcccagcacgcccagcagcggcagcatccagaacgggttgatcaggttgggcagggcttcggccgcgttgtagacctgcaccgcccagcccaggtgcgccttcagttcgttggcggcctgcatcacgtacggcgcctcgatgatccacttgccgccaccggacggcacgaagaagcccagcacggccgaatagacgcccatcaccagcgcgaacgaatcggtgctggccacgtgcacgaacaggctcgacagccggtgcgccagggtctgcccgtcaccgccagcggcgtgggtgaggatcatcgcgatgccgccgtacagcgggaactggatcagcacgccggtggtactcggcaccgccttggccaccgcgttgaggaagctgcgcgggcgccagtgcagcagcaggcccaacgagatgaacaggaagttgtaggtattgaggttggcgatggcggtgatcaccggcttgttggcgaactcgttgaacagccagccgaacgccagcagcgagagcagcacggtcagcagcgggctgtattccagccattcgcccgggcgcgtgcgtcgctgcagcggttgcggctcggcctgtgcagcaccggggaactcctcggcggtacgcgcactacccgccgcgggtgccgtcagccaggcgatcagcagcgagaccaggatcagcaccgaggtcagcgcgatcgactgccacaggaagatggtttcggtgaacggcagcacgccggtgatctccaccagccccggcggcatgctggccgggttggcctgcagctgtgcggccgaggaactgagccccattgcccacaccgcacccaggccgaggtacgccgaagcaccggcggcgcggtagtccatgcgcagttcggtacgacgggccagcgcacgcaccagcaggccaccgaacaccagcgagaacccccagctgagcagcgaggcgagcatgctgaccaggcccacgtacaccaccgcaccgcggccggtacgcggcacccgggcgaggaaatcgatgaagcgtgcgaccaccggcgccgtcgccacggcgtagccaccgatgaccacgaaggccatctgcatggtgaagggaatcaggctccagaagccgtcaccgaaggcgctggcggtggcctgcggggtcgagccgaagcccatcgcggccagcgcgacgatgaccacgcccagcaccgcgaacacatacgcgtcggggaaccacttttccgcccaggcggccgaacgcagcgctgcgcgcgccatccagccgtcctgtactgctgccgtcgaggccatcgcctaccctcccaggttcgatggatcgattctgggcggtggggtgcaggctgtcagccacctattggtcgtaggtggcggggtcggatccctctccacaggagagggctctgaccccgagccgggtatcggcgcggcagaagggtcagagccctttcccacaggaaaagggatccgaccccgggcaatcaacgcagcgccaggtccgcggcgatgccggcaaacagcgcggcacccacccagttgttgtgcaggaacgccttgaagcacgggccgcgttcgcggttgcggcagatccagaactcgtacaccaccagcgcggtggccacggccacgccggccaggtagtacccgcccagcccgccgcgcacgccgaccagcgccatcgtggccaggaacagtgcgtacagcacgccctggatgaccaggtcgagatcaccgaacaggatcgcggtggagtgcgagcccatcttcaggtcgtcctcgcggtcgaccatggcgtaccaggtgtcgtaggcggtggaccacaggatgttgccggcatacagcagccagcccagcatcggcacctcgccctgcacggcggcgaacgccatcgggatgccccagccgaacgacatgcccaggtagacctgcggcagatgggtgtagcgcttcaggtacggatagctggcagccaggaacacgccgatgaagctcaggccgatggtcagcccgttcagggtcagcaccaggccgaacgccaccagcatcagtacggcgaacagcgccagcgcggcacggccgctgatcgcaccggtggccagcgggcgcgccttggtgcgctccacatgcgggtcgagccagcggtcggcgtagtcgttgatgacgcaaccggccgagcgggtcagccacacgccggcggtgaacacgaacagcgtccacagcggcggcaggccgcccgcggccagccacaacgcccaccaggtgggccacagcagcagcagcgtgccgatcgggcgatcagcgcgcatcagactccagtaatgccgccaacgcggcgtcgccggcgactgcggcgaagtgaggggggtatcagccatggcgataggatactcctgcccctccggcacggctttgcccgtggggggagatttgttcggcgaaactggatagaatgccggtcccgcaccgcttcatggcgttgcgatgcccgccccggcaccggccgacggcgcggcggttctacaacgcgcccgtagctcagccggatagagtagtggcttccgaagccattggtcgggggttcgaatccctccgggcgcgccatttttccttcattgcctgtacgcagcgtcccaactgggcgatgctgcgatgtcgcgaggtgtccggcacgccgccaggaatgtcagggaatgaacgttgccgagcgatgctcgcaaccggctgcatcccgtaccacgatggagtactccgtgtccgcactggattggccgggcaggaacacgccatcaccatcgaacaaaacgctctgctgttcaccctgcccgatcgacagcccgatcgctcccggcgtgatttcctcaaggatcacgttgtaaggccgccaggcatctccgccggttcgcctcatctctgcgcgagcggtccttgagttcaacctgcgtctctcatccacccacagctgaagcggctgatcagcattgtgggtgacctggaagcgcccgtaggtcagtccgtcgactctctcggtgccgacgtaggtgaaatgggccggcggacacttcgtggtgcggttcggatgcgccgcacaggatgtcagtgcaaccacgaggcaaaaggcagtcaggcgcttcatgggttcgaggcctgatgtgggttgttgtcgcggtggcaagcggcagtgagggcaaccagcactatgccccagagcggcgtgctgatgcccgaacaccggacgcttcacccatactgttccactcccaaccttctacatcgggcgtcactgctgatcgactcgccagccatagacatgagagccctagaagggaccggctaaatgctgagcaccatctgcaacccgttctgcaaaacgatcttcgcgcgatcgaggtcacgtctagagatggagaccgccgccagcccaacggctcgagcgatctcgcattgcgagaaaaatgtgtcgtacgtatcgatcatgtcggcatgaaacatctttcgcggagcatttgctaccaccctgaaaagatcggtcatgaagttccaagcatcaataacagcatctgggctaacgccaactcccgaatcgatcgaatatatcaatgactcaaagtcaagtaacgattcaccttcccagtccacagccccctcgcaggcagcgacttcgtaatcgagcccctccctactgccggctgacacaggcctcccgttttttgatagcacataatcatattcatctgaaacccacgcaaaccagacgaccctcccctgcgcagcaatcccaaccggatatatatcagccatcacaagctcccacctaaatgacgccatcgacccaagctcttctggaattgcgtccatcagaggatcttgactgaagttgagaaagaactcttcaaagaatccaggcttttcaccgctcggagtgaagttggtttccgcatattattttaagcttgctcaagtttgacccctgcccttttccgggaacttgaccaaactccttactcgctgggcatactgaactggtgcccccaattcgtaggatttgtaccccgcgcccaagatggcatgtcatttttttagttccctatcatgggctggcacttggcgtgtcgctacgctgctccggatttgcggcagcgtgcgcaatcgaagcacctggcctgcgcgcatagctgtaatcggcatcccggcaggcacgcacgatcggacttcgtgcgtgcctgatcacgcccgggaaccagcagagcaccagcactaccagacagatcgttcccagccgtacccattcacccgcgacactggccccgatcagcggcaatgccgccaccaagatgacgacctgtgtgtacagaagatagagcgtgtacgtgcccaaccgcgggtctgaacgaagctcgacgcgacacctccggcaggacatctttgcttgacgccttccagcaaatcgcaggggaaagcgctgcccgctggcgccacaaagtggacagatgaagctcatcaggcgcatcggtagaacctcttttcagaagtttccatcagcaggttccatctgcggcgtcgaccatacgcaccacatcatcaaacctcgggtcctggcacatcatttccagtggtgtccgatcaagctcattccatgcgtgtgggtctgcaccacaccataggagatgggccgcagctgcgacgctgccatgtgccaccgcgcttgtcagcggcgtcagatcaagatcaccacgcacatcgatgttggtcacgaagggcatcaatgcgctgaggagagccacatcgttgtaataggccaccacatgcaggggcgtgtcctcataggctcctcgggtctccggacaagtcagcgccgcatctccgaagtcagtgtagacaccgagccgggaaagcagttcgctgagtacaggatccatgatgttcatcgggctgcacgcacggtagagcccattgcgttggcccgatggtggtccgtcccacaatccatctctccgtcagatccctgtcgacctacaagcgaagcggtgcgtgcgtcttggagcgatgcgctcgacagatcaggaatcatgacttgacaggaatcaaccggctatcccaagtgccctctactagaagtgcaatctctgcgccggcagaagcctcaatgaagaccaaggtgtcaccgtcgacaatttccctggcagccactggatctaggccaaggaggaagcaacaccgcttgaattcaaaggaatcatcctttcgattgaagaccttgagatcgagcacgacattctggctagagaaaccatcaatgcttgctctcctgacttggccaaagaccaaatcataggatgcccgcgaagattcatcgaacagagaaacagtcacacctgacaccggatcaagacgaattccaaccagctggaaatcgtgaatagtgatacccatgcaatcacctgtcggaaccatacgtcgcgcgtgatgctccaggcgcagcctactgattggatttcattcctttaatcacaattgccatgaacatgccgcaaatcaggagtgcccccagcgccacaggcaacattacaaaataatcacgcctctcaagatgaccaatagcatacaccttcaatacaagataggacgaggacctcaaaaaaactagcgcaaataacaacaaaccaagccaattcattattttcttgcgcatatgcatatcacctccattatatgcaactgcacccagacccacccgaaacatccttcaccgccttcatggcatccagcgcatccttgtcaggggctatgcagtgcaacagttccgtgtggccttaaggtgaccgttgaacgtcaagccgaatgacgacagctctcccgtcttcgcgccaactgccccccgccacctcggtatagatggactctctttcctttgcatcctgagcggtttgtatcactgacactccatcgtacgccgttgctcgaccattcaccattaccaggaatccggggattgcaacttcgggctgcggagacaaaacaccggcaatggtgactccttcgccattcacagcttccaagcctccaaaggcgaggtctgccacaccgaacgtcacgcccaagtagtcgacgcactcacacgggcacagaccaggtggatctaccaaatacaacgggacgccacctgcgtacggccggcactaccccggcagttgttcagagcatccctggaaatatctatggtgccctcctttgccgaagacggagcaggccgacagacccgattttccacatggcaaacgctgtgcaaagagagagcgcgacaaacgccaaacccgcaaatccgtagtctcgtccaccatcagaaatatcaaccagcacaaaagcaaggagcactgaatttacggcaactccaaggcaagcaaccagcctgagcgcccagaagaacatgatgtagtaagcctgaaaaaaactattgtattttctcatctcaaggacacccgcatccttttgcagtcagcgcagctatctgaccaggaactgtgtagccagatcccgacatgacgccaaacccaactccaagcagtggagggaccgaaagagatccaccaccgaccttatctcgccccatatcttcaagtcagaaaaggcggcgaagccacccaatctgctccactccagatcgcgacattccgcatcggatcgatcaccacgcgtagcgtacccaggtgatctggctggacgtaagccagctccggcacgccggcgctcagcacattgatcagcgccaccgggtagctgtccagccagatggcctgctgctgcgcttggcccatggccgaaagctgcccagccactgccccgcttcgtagtatagggtgacctgcgctgcgccaccggccgggctgcgcagcacgcgctcgccgcggtggttgcagatgtagcattccaggacggcattgccctgtttcaccgcgttcatgcggttggcatcgttgtaggtgaacatgttgctgccggcgctgctggccatgtcttcagggaccacctcttatcgctgcaaaccgaaattggcccggagcaggtgtgaaggcgttgcgcgcggacattgaatccacccttcgcttgccggagacggatcagggcgaaagacccgattcccccccccttcccataaccagctcagcgcaattctattccttcgggttcgcaccggcctttcggtttaaaagcaagaaggacacaacacttgaaactgcaccccaaaccggcgtcattaaaacagtacttataattccgaacgataccaatgcctgccacatgaaacctgcattgaaagaataaaatctttcacgctcaacaaaaattactatcgcctgagcaaataatccagccaccacgccgacaccccctccccagaccgcgcatttccaccccccccctttccatagggcctgagcaacacaccaaatagaaccaggcctgccatatacagccaaggaaacaacctctcagtatcaaactgatacatatcccatagaggctccggaattccaacatacatcaccatcgagacgaccagtgaaatcccagcataaagtaaatttcgcccatccatttaatcacctctttggagaatagactctgatcttaactccgggaagctttgacaaagacttacccagtgttgcaggcgtaaatttaacaccaagactctcaaatggcccgaccccattgattgcggaggatgttttgatggcgcaaagccctccgatcgccccccccaactgctcggagtattcttgaatttgaagctcgctatactcatcagtttcaaagctaagcgtgtgtaccgttgacccttctgccaaatgatgattcacaaagttcgtgagattggcgtcagcgcctgagaatatgtcaccacttccgcgcgtgggcgaatttgggttggcgcccggatagcctccagccggatcatacaaaaccccctccgctcccttgccgtctacatgcacggcagcgtgagtgcctatgcccgattttgaagtgacaataactgttgtcttcaaaccataaggatcaccattacctagcgcattcgcatacgcgtaaagataagtggacaccccacccatcaaccctattggatcactctgcgaataccgccccacggatgggtcgtactcacgctggtagttgtagaacaacccactcccgtccgttgcctgctggcccgggaagcgcagtgccagctcgaatgccacaccatcgccatccggatcggcacttgggatctggttgccgaacacttcgctcttgttgctccactcccagatcgccacatcacgcaccggatcgatcaccacgcgcggcgtacccagatgatctggttggacgtaggccagctccggcacgccggtagccggcacgttgatcagcgctaccgggtagttgtcgagccagatggcctgctgctgcgcctggcccgtggccgagtagttgcccagccactgccccgcctcgtcgtacaaggtgatctgagccgcgccaccagccggggtgcgcagcacgcgctcaccgcgatggttgtaaccgtagctctccagtgtggcgttaccctgcttcaccgcgttcatgcggttggcatcgttgtaggtgaacgccttgctgccaatactggtggtattgcccgctgcgtcatggctgcgtgcctcgccatccacagcagtcaggcgatggctggttgcgggataggtgtagctggcggtgcctgccgaggtggtcagcgcggtgcgattgccggtggcgtcgtaggcataggtttcaatcggcgtgcctgtcgtcccgtcctgggtctgggtcaggcgacccagcgcgtcgtaggcgtacttggccagcaccgacgagcctgcgccgttcttcagctcggtgatcgaaccgacgggatcgtagccatagcccagcgacaggccgcctgcggccgggtcatgcaccgcctgcgggcgatagtccaggtccagcggacgctgcagctggcggccattgccataggtccagcccgtcgccgggccgaaggccgcataggtcacgttgttcaccacgatctggcgtgcctggccgggccgggtcaggccgatctggctgatgcgcccctgggtatcgcgcacgtagtcggccacgctgccgtcggggtaggtcaacgcagtcaggcgccccgacttgctgtaggcatagcgcagcgtactggcaacgccgttgacggtctgcaccttgcgggtgatctggccgaagcggtcgtggcagtactgggtgctgccattggcgtgcagcacctgccccaggcgccccttggcgaagcgctcgtctgcggcacaggcggccggcgccacgtcatagctgtagcccacgtccagattggggtccggataggcaactccgatcaaacggttcagcgcatcatagtgataggtggcggtgacgccacgcgcatcggtagcggtcttgcgattgccggcggcatccacggtgaagctgctggcgccactgtccgggctgacctgcccggtcaggtcaccgaacccgttgtaggcgtaggtggtatgcaggcccttcgggtcggtgacctgggtgacctggtccagcgcgttgtactggctgcggatctccgctgccacgccatcgacatcctgcagggtctgcgccagtcggttgagcggatcgtactgctggctggtcacgcgctgcagggcgtcggtcaccgtctgcgggttgccattggcatcgtaggcaaagccggtggcgtgattgccagcgtccttcagcgcggtcagctggccgagcgtgttgaacgtccgtgccagggtgcggcgcagggtgccgcctgcatccagcgtgtcttccttgaggcggttgccggcgttgtccagcgcatagtgaatggtgttgcccgcactgtccgcgatgtccgtcagccgctgggcggcgtcgtagacataggtaacgctgctgccgtcaggctcggtgacctgttggacctggccggtcggccagtagctgatctgggtcacccggtcctcggctgtggtggcaccgcgcacggtgaccgaggtcggccagccgcgcgcatggtaggtgtaatcggtgaccacgccgttggcatccttgaccgacaacggccgcccgaacgcgtcgtaggccaaggtctcgaccgtctggcccagcgcattggtcacgctgcgcaggtcgcccttgcgataactgcaggcaccactggtcgcgcatcccgcgtcgtccgcggtgtagtaggcataggtggagacatccgccacatcactgcgtgggccatccacgctacgcagcagtcccaccagcgggcactccgggccctctgcctcacagtaggtctgcgtggtgacgcgggtgtcaccggtcaccctgtcgcgcacggtgatggtggtcggctggaggcgcgcattgcgcgcgatgcggatctcacggttgccaacggtctgctggaccagccgattgctgtccatggccacgcgcgtttcgctgatgcgctggtccggagtacctgccgcttcggtggtggtggtcacactgacagcacctgcgacagcgtcgctggcctccgcataggcgtagttggtaacaacgccacggcgatcggtcactgactgaagccgacgccggaaatcggtgccctcgggcagataggcgcgagtgatgctgccattgctttcggtgatgccattgaccttgcgcggaaggccactggtgccgctggcggtcaaggcgtaggtgctctgcttgcccagtgcgtcggtgacgatggtggtgcctgccggggtgtactccaggcgcacgccatcaatgcccacgtcggcttggctgcaatcgccggaatggcggctgcaggtgactcgcccttgcgtgtcatagccgtaccagctgtagcgctggttgtcttcggcggtcacgccggtcaggtagcccgggaagcgggcatcctcataatgatacgtacggctggcaccgtctgcataggtcgcggtgatcagttccccggccggggagtaggcgtagctcaccacaggctggccggcgatcaccagggccgagatcagtgaatcgtcgcccggcgcgaggtactggacgtccacgcgtcggccggttgaatgggtgatgctgagcaggcggccgcggccgtcgtgtgcataggtcagcgacgttccgtcttcgaaatcgcggcgccgcatcaagccatcagcatcaaaatgaatgcgctctccggcacgtgaaagttgccagttggtgccctgctggaccgcgcgatcgccgcttccgtcgatggcttcgtagcttgcccccactttctggaatgcggtctgcccgccatcggcgccgatcagcccaactttcagttcggggctgggagggaaggtggaatcgtctacgcctgcggtaagccgcagattgtgggaatgggtccagcccgtgcccaacgcgccacccgccgtgcttgtcagggagtgatagtggcgttggaagttcacccatccaaggttgaaatccggctcaggctgggatttatcgccagtggtcgggtcacacgggttaccaacgggacactgctgcggcggcagcggcgcgcttgtgtaggagagcatgggcgacatgtgcggctcgtcctgctggaccagtgagcacatctgcagggcctcattccacgtcagggacggtcgattcggacaaagcgccgttctggcccggcgcacacgctcccaccccactatcgacgagcattcttgagtgctctgatgatagaagttcaaggtgtaatggaaatccttctcctcgttggtgacgctaccgtcgtcgcccctgccaagtccaaggagctccacccaaggatcctccgtgagtgaagtcgccgggcactgcgggtcgctgacgcgggtagcgaggatcacgctacgaatctgatcttcggatgagtactcctgccctgagtggatgtagacccagtcggtagtaacgatcttctcgggtctcacccggtaatcgtagatgaccttctttccaaggacgcgttggcgtttgacatgccaatcgaagggtttgtccttttcgtactgggaaaagagcgacttgatgtccttctgcaccgccgcttcggtggctcgcggctggcccatcgacaggtagctctcccacttcttctgcacctcctgcgcctgcgcagcccaaggagccaagctccccagcgcgatcatcgccagtgcggcacacgaaatggtcttcagtcgttccaacatccctgttctccttcctggacaaacacagcaccggcaggaacgagaacgtggggcggttgcctcaccacgtcatgcttcggatcgtccctggtccggaatgcggcctgaccgcatgggggacgttatctccgatgtcgtttacacattcaagtcagaaactgtggagcgggtcggatttcagagttttctgattcagggggggggaacgtgtcggaaattcagccgagcgtgggctcggctctacaaggcgaatgcctccagaaacagaaacaccgggcagtgcccggcgtctccgtcacagcgtggaagggtgtaaacctcaatacctcccgtcgaacgcgaagatcggcttgcgcgtcttccacgcaccagcagtaaagtccgggaactccagcgtctggaagccgttggcgatcgactgctcgctcaacggggtaatcgcactccaggtcaccgcgtcgtagatgtcgatcggcatcggtgccttggccttcagtgcttcaacaaatgcatggatgacgaaccagtccatgccaccgtggccggcgctggcggcggtgtcggcattctgcttccacagcgggtgttcgtactcatcctggtacttcttgaactcctcccactggtgcggcgggctgcggccttcgatgtggatcgaatggttgacgtccatccacaggcccttggtgccctgcacgcggaagcccatcgagtacgggcgcggcagcgaggtgtcgtgctgcagcaggatggtctcgccgttctcgcaggccagcgtggtggtcacgatgtcgccgagcttgaacttcaccttggtgctggggtgggtggtgccgccactcttggccacggtgtattcgtgcaggccacgcgccttggtcgcgaaagcgttgatgtgggtgaagcggttgccacggttgatgccggtgtacatcgcgcacgggccgatgccgtggctgggatacagctcgccattgcgttccaccgaatgctcggtgcgccagcgtgcttcgctccagcccttgggaccgaactccacgccgctgtcgtacggctggttcgggtcgccggaattgaacttcacgccgcgcaggtcgtgctggtagccggcctgcagatgcaccagctcgccgaacaggccctggcgcaccatctgcaatgccgccatcacgtcgcggcgatagcagacgttttccagcagcatgtacggggtgccggtgctcagctgggtcttcagcacgtcccagtggtcctgcagggtgatgccggccaccacttcgcagccgacggccacgccggcctgcatggcggcaatcgccatcggtgcgtggtactcccacggcgtggcgatgatcacgccatcgatgcccttctgttccagcaggcgcttccacgcgttggtatcacgatcctggccataggtcttcggcgcgggcttgccggccttcgccaccatctctgtggcacggcccagcatgatcggctcgatgtcgcacagggcaaccacttcgacgtcgtcgcgacgcaccagctccttcagcagcaccagcccgcgcatgccggtaccgatcatggccaggcgcaccttgcgcccgcgtgcccatgccggggtctgcggcagcaggctgctggcggcgacagcggcactggccgcgatgaattccctacgcttcatggcagacatctctcctcttggcagcgtgccggccgcagccggcacgccaggtcacgcaaacggaattacttgaaccggtagccgatggtcacactgtaaccacggccgaagatggttgcgtagtcactggagtcacccaggaagctgttcggatcgtagaacggcaggcggttgaacaggttcttgacagtgaagctcaggttccacgcatcgtccgggcgccaggtgacgctcatgttggcggtccaccacgacggtgcaccatcgcacttgctcttctgcagggccaggtagccgccggtgcaggtttccttgttgttgctctcttcgtcgatctggtcggtggcccacttggtgccgccgacatagttgacgaacatgctggtggtcacctgcttgtaggtccagtcggcattgagcgtggcgcgcaggcgcggattgttgtaataacccacaacgtcgccgtagtaccagccgttctccgcgtccatgtagaagcggttgcggttggcgatggtggcggccaggccgatgttcaggttgccccagtcgcccagcgagaagcggctgcgcgcatcgatgtcgaagccgtcgatcagggtcttgccgcggttcttgtactggccgaccacgctggccacgttgccggcggagtagcccggcagagtggccgggcagctcacgccgctggccggatcggcgcacattgccgccagctgggccaggttggcacggtcgctgtcggtgatcggcgagcgcgacatcgagatgatgtcttccatgcggcgatagtccggcgcgacgatttcgttgttgcggtagatgaaccagtagtcggccgacaccgacagccagctggccggctcgtagacgaagccgagggtggcgatcttcgccttctccggcttcaggtccttgttcggctgggtcatgcgcgcgacggtacggctgcaatcgacgttcagcaggctcttgcccagatcgacatcgcccggccgctgcgacttcagcagcaggttggcgatggcgttggtctcgttgcagcgcagctcgtcacggaagccgccgagctgggcgaacacgccgccattgccggactcggccaggctcggcgcgcggaagccggtggagtaggtaccgcgcagcatcagctggtcgaacgcctggtacttgaagccgatcttcggcgcgacgttggcgctgaagttcgggtacttgtccacgcggaccgcggcgtccagctccagcttgtcggtgatcggtgccacggtctcggcgaacagcgcgtaggtgttgcgcttgccgtcgaaccacgagccgccctgctgggtgatcaggccgttggccgcatcggcgttgcccggggtgtagaaggtttcgcggctggcgttgaagccgaacgcggcgcgcatctcgccggccggcagctggaacagcgggccttcgatcttgccgtccagggtgtgcaggcgggtccacgactggatgtcgaaggtcgggaacgcttcacggatcagcgcggcgttggcttcgctgatctcgccgaacttgtacgccggatggtcggagatgatcacccgaccggtacctggatcgatcgtgtacgggccgaaggccttctcgaagcccttggtgttgacgttgatcgtctggtaggtggtggagtgggtacccgcgctggcgaaggcggtttcccagttccagtcaccccggttgccacgcgcaccggccagcacgcggtagctcttgtcggtattgcgctggccgaaatagttcgggccggcatcctgcagcaggtagttcaggccgaccacgccgcccatcatggccctcaactgcgggctggcgtggttgtactcgttgttcgggcccaggaacgggtacaggaactggttgacggtgttgccggtgttgcgcgagaaccagctggtcgggttgccggtcgtggtgccataggtgcgcggcgtgccgccgttggcgcgcaggtcgatgtcggtataggtcgcctcggcgaagatctcggtgttgtcaccgaccaggaaggtgccgttgaggtaggcggtgttgcgctcggacttggcaccggcatcgatctcgttgttcatccaggtttcccagacgcaacgcggaccggccgcttcactggtcagcacgttcctgcagcccggcgcagcttcctgcacgcggcggccggtgaccggatcgaaggcgaagtaggtgcccgggttgaactcgcccggcttgctgcccacgcccaggcgcaggttgttgaggtagttcggattgttgacgtagtactggtccggacgcttgtcgtagaaatcgctcagcggaatcgcgtcgcgacggtacatgttgaccgcgccatagatattgaagcggttctcggccaagtcaccgaagccggcggtgatgctggcctggcgctcaccgtaggaatcgatgcgcgaggaggtgtcgttggtgaagctgatctcggcaccctggaagttgcgcttggtgatcacgttgatcacgccggccaccgcgtcggtaccgtacacggccgacgcgccgtcggtcagcacttccatgcgctcgatggccgcggccgggatcgcatcgatgttgacgaactgggtctggaagccggccggcgcaccgtagtacgacaggcggcgaccgttcagcagcaccagcgtgccctgtgcgccgagcccgcgcaggttggcctgcgaggcaccatcggaaccggtgaacagcgagcgcgcatcctgctgcgcagggcgtgcggccggcaggttgtcgagcacctgcagcagcgtgcgcgcacccatgttctggatgtcctgcttgctgatcacctgcaccggcgaggcggtttcaacgtcggtgcggcggatgttggagccggtgacctcgatgcgggccaggtcggtggcgttgtccttgctctcttgggcgaaggcaggagcggcaagcgagaacagcgcgccggcaatggccagcgtcagcggagcgatcgggcggcagggggggcggtggtggcgggcgggcaacatcggggttctctcctggcaagggtgcggcgcaactgagtgagcgcgtgggcgttcggcgggcaaaacgctcccgggccacggccatgagggccgtagtcgggatggggcgggggaggagcggtgttacgtgggggtcatggggcgacgatgctggcggagtcgccctcctggccgatcagtacggcgttggcccagttggcacagacctgggcgggttggctgccctgcgcacccagcgtgcgcaggctcagggtggaaaggccacggatgtccagctccggcttgaccacgccgggcgccttcaccaggccgctgtcgtacagcaggcggttgtcgccccatacctggaactgcaggccgccggcgttgcggcaggcgtcgtcgatgccgaggtcggcacgcagcaggtgccagccgccctgcaggcgcaggtcgatgcggctgttggcgccgacccccaggccacggcggaactgcaggccgttcatgcgcatgccggcgtcgccacggaaggactggtcggtacgcagctggctggccagcgcggccggcaccggcagctcggagagatagcgctgccgggccggtcgctccggttcctggtgttcgagaatgtggaaggtggacagggcgatcgggccgacatcgcgcggctgcagtgcatcgaacgcgcgggcgctgccctgtgcggcggtgaccatcgggtcggtgctgctggcgccgtcgccttcggggttctgcacgctcagcacgcggaagcgcagcaggcggccggcgtgggccgggaagtcgatgcgctgcacgccttccttcaactgcaggcggccgcgggcgatcggctcgccccactcaccgttgctgtcgcccaggtagacctcatagtcacgtacctgcccgtgcttccagttcttgtcattgcgtggcgcgatgtcgatgccatcgatcatcttccgctcgccgaagccgatcacccactcgtgggcgccggtgcgcacggcctggttgcgcacgctgcggaaccaggtggccggatcgtcgtcgaaggcgttctccaacgcatggccaggctcttcggccgggcggttgaccaccagcaggctgtcggccggcagttcgcggcccagcaccggtgcggccggataggcatcatcggcggctgcggcagcgactgcgaagtccagctgcagctgcagtggctggcggatgtcctgggtggcggtgcgcacatgcacggtgccgcggcggtccttggcatcgaagtaccagccctcgttggcgctgttgaaggcggcagcatcggccagcgccggcagcgcgcggccaccggcctgcaccgcacgtggtgcctgccggctgagtacgcgcaggccgtagcggcgctgcgccagctggccgttgtactggccctgcacggcgtcgatctgcacctgcaccgggccactgccctgcgccggcgcctgcacgcggatcacctgcgtgctcgactcgccctgctggtagcggcgcgtgttgccatcgtcttcgtacaacgtgtactgcgagtcgccctgcgggtacaggtcgaaggtcacttcatcgagcggtttttcgccatcgaacagcatcgacgggtacatcggcaggatcgcaccggcacgcacgaacaccggcagcgtggccaggtccacctggcggtcgagctggcggccatcggcggcggcctgcacgcgacggccatcccagtagtcgatccagccgccggccggcaggtggatgtcgcggcgccagccacggctggcggcctggctgcggtacaccggcgccaccagcaggtcgcggccgagcaggaactggtacttgtaggtttcatcctgcgcatgcggatcgcgcgggttgtcccacataaggccacgcaccggcggtgcaccggtctgcgcggcctcgtgcaccagcccatacatgtatggcgtcaggcgcatcttcaacttcaggtagtcgcggttgatgctgcggtagggctcgtcgtaccaccacgggtgcttgcgcgcgttcgacgaccagccgctcatgcccatcagcaccggcgtgaacgccttccactgcaggtcgcgggtgaaggtctcggcgcttccgccgaagatcgcatccacatcgccgctggcgtaggccatgccggacaggcccgaaccgaccagggtcggcacgtgccagcggatgtaatcccagctgctgctctggtcgccggtccatgccaccgcgtagcgctggatgccggcccagcccatcaccgtccacaggaatgggcgcgaatcggaattgtcgaggatgccgttgaatgcctggcggttggcgtccatcgcgaactggtagcccttgccggtccaggccacgtccagcttctgcacgcggctgccggccttgcccacttcccacgcgatcttgtcgacgccgttctcggtccacaggccggtgcggaagccgtagccggccagccccttcaccgtttccggcagctgcttgtagccgcagccgtagccatcgttgggcaggatccagccaccgggcatgtcgtgggcgcggtactgcttggccacgctgtcgatcacatcgggcgtggtgccggtcgggccgtcgctccagccttcgggcacggtgccgggcttcctgctgttgtcgccgtcgttgtagcaatcggcatcgccataggacagcgcccagcgcgcgaccatgttggggcggccggtcagctgggtgtagcgttcgatcagcttgggcaggtcggcgcccacgaagtagtacgcatcgaagcggtcttcgcgatgcagcagcgtggcctggtcgctctggcgcaggtcgtagctgccatcgctccatgtattgcgcagcatgccccagccacggctgctcagcagcatcggcgccgggctcggccgatcaccttcttcccagccaccggaataggacacctccagctcgcggcccttgaactggtaacggccgttctgctggccaccaccgaagtagccctcatcggcctgcgaggacagcacctgcacgctctgcgtggcatccaggtccagcggttgcagttcctgccacagcgcggtgggctggccattgtccagccgttccaggcgcaggcgcagcggctgccgctgtacatgcagtaccagtgcctcggtacgcacgcggatttcctgtgcgtcttcttccagctgcgcctgcacgctcgccttgggctgcggcagcacgatcggcgcggccttgtcgccggcgccggtcaacgtgccgttgcggccggcctgcacgcggatgatgtcggtcgccggcagttcaatgcggatgcgcgcgcccttgtcggtctgcaggtcccagccctgcacgccgtcgcggctggcgctggcgctgaccgtacgcaggttgccgaccggctcggcgcgggccgtcatggacgccagcatcaaggccggcaccagggccagcatcagcggcgagcgacgaacgcagttttccacgcggactcccaacccgttcaccgggcgtttcgaaagcgattgggccgactctagggcagcgattcgaaagatgtcaacaaattgaaaggaaaaaggaagatatattccattgaaacgaaagttgttgcgccgcaatactttgtgtaagcgcttgcaggtgcctgttaagcattgtgcgatacggcattcagtggtcctttcgtttttcccggcattgcgcacggggcaaagccacccaccttttttctttctttttactttcgatgtttgacatttcgaaagaaaacgcagatggtgcgctggcccaactggaacctccgaatggacgtcaccctgctttccgatgtgtccgcctggcagcgccttggcggagccgataccgctaccgaaatcgcccagcagcctgcgctgtgggacgccctggcacaggacctgtcgcgtgcccgcgaccgcctgcaggccttccccggcgacagcctcaacgatcccaaccagcgcgtgctgttcaccggcgccggcagctccggcttcatcgccgaaatggtggccgacgcgatcaacgcgcaatggcctgccgaggtgcgcgtggtgcacaccaccagtctgctgacccacccggcgctgtacctgcagcgcgaccgtccgaccctgctggtctcgttcgcccgcagtggctccagcccggagagcgtggcggcggtggaccgcgtgcgcagcgacgtggatgacgcgcgcttcctcgacatcacctgcaacgccgatggcgagctggcccgccgtggcgccggccgtgccgacacctgcaccctgctgatgccgtcggccagctgcgaccgcgccttcgccatgaccagcagcctgacctgcatgctgctggccgcgctgaccgtgttcgatcgttcgccgtgggatgcgcgcgtgacgcgcctgaagcagatcgccgcgctggcccgcgaaggcctggcgcagtgggatgcaccggtggcgacactggcgcagcgcccgttcaaccgcatcatctacctcggcagcggcccgctggaagcactggcacgcgagtgcgcgctgaaggtgctggagctcaccgctggccgcgtgctggcgctggccaacacacccctgggcttccgtcatggcccgaagtcgacgctggatggcaacaccctggtggtggtgctgcgcagcgtgcagccgctggcgcgccgctacgaacaggacctgctggaagaactgcgccgcgacggcgtggccggccaggtgctggcgatcggtccgcattcggacatcggcgccgacgacgaatacaccctcaccgtgccggcactggacgatccgtggctggcaccggtgtggctgggctttgcgcagctgttcgcactacagcgctcggccgcgctgggcctgaccccggacaacccgttcccggacggcaccgtcaaccgcgtcgtcaagggcgtcaccatccaccatggctgagctgatcgcccacgcctgctacggcatcgacatcggcggcaccaagatcgagctggtggcgtgcgatgtggcgatgcaggttacctggcgccgccgcgtggccaccccacagggtgactacgacggtttcctgcaggcagtcgtggcgctggtcgccgaggccgatgccgcactgggccgcagtgatgcggcgatcggcatcgccctgcccggcgtgcgcgaccgccgcagcggccgccagctcagcgcgaacgtgcctgcgttgaccggccacagcgtggccgcggacctgcaggcgcggctgcaacgcccgctgcatttcggcaacgacctgcagtgttttgccctgtctgaagcacacggcggtgccgccgacggctaccccagcatgttcggcgccatcctcggcaccggtgctggcggtggtttctgcgtgcagggccgcctgctgaccggtttcaacgggctggccggcgaatggggccactggagcgtgcccggtcatctgctgcagcgccacggcctgccgctgatcgactgcgcctgcggcctgcagggctgcgtggagcgttatgtgtccggcagtggcgtggcgatgatcgagcgccaccttggtggcagcgccgccgacgccagcgcggtgatcgccctggccgaagccggtgatgcccgcgcgcgcaaggcgctggacatccatcgcgacctgctcggccacagcctggccgcgctggtgctggcgctggacccgcacgtgatcgtgctcggcggcggcctttcgcagtacgcgccgctgtaccagcacctgcccgccgccatcgccacccacctgttcaagggtgtgcaggtgccaccgatcgtgccgccacgcttcggcgatgccggtggcgcacgtggtgccgccctgctcgcctgccaaccctcgttttcctgatgtccggagcctgaccatgtccccgttgcagaccctgcttgcttcccaccgcgccggtgccaatgtcggcctgtacagcgtctgctgcagcaacgagcaggtgctgcgcgcggccatgcacgtggcacaggcacatggcaccgtgctgctggtcgaggccacctccaaccaggtcgaccagttcggcggctacaccggcatgaccccgccgcagtaccgcgattacgtcggcaccctggccgatgaggaaggcttcccacgcgaacggctgatcctgggcggcgaccatctcggcccgaatgcctggcagaagcgcccggcggccgaagcgatgacccacgcgcgcgtgctgatcgaagcctacgtcgccgccggtttccacaagatccacctcgactgcagcatgtcctgcgccgatgacccggtgccgctgcccgatgccatcgtcgctgcacgttcggccgagcttgccgagatcgccgaacgcaccgccgccgaacacggcctgccgccgccggtctacgtgatcggtaccgaggtgccgattcccggtggcgaagcctcgctggccgaaggcctgcaggtgaccacgccggctgccgccgcgcagaccctggccatccaccagcaggcgttcgacacgccacagctgcgcgatgcgtggcagcgcgtgatcgcgatggtggtgcagccgggcgtggacttcgaccacagcagcgtgcatgagtacaacccggacgccgcccatgcgctggccgacttcctcgagcggcagccgcgcatcgtgttcgaagcgcattccaccgactaccagcgcgaaagcggcctgcatgcgctggtacgcgaccacttcgccatcctcaaggtcggcccggcggccaccttcgcctaccgcgaggcgctgttcgcgctggccgcgatcgaggccgaactgctgccggccgcacagtgctcgcacctaccgcaggtgctggacgaggtgatggtggcgcagccgaagtactggcagtcctactaccagggcgatgccgccgcgctgcgcctgctgcgccgttattccttcagcgaccgctgccgctactactggggcgagccggcgctggtacaggcggtgcagaccctgttcgccaacctggagcagcatgcgccgccgctggtgctgctcagccagtacctgccggagcagtaccgcgccgtgcgcgaaggcagcctggccaacacccccaccgcgctggtgcagcaccgcatcggcctgtgcctgggtgagtacgcccgtgcctgcagcgccaaccaggccggaccccgcacgcagaacgcaggttcggctgccggcgttcctgcgaacggctaatctctaccttttcccgcaaaaccgagaatggccatgcgcaacacccgctcccgccggcaacagatcctgcagctgctgatcgagcacggctcggtgcaggtggccgatctggtcgagcgcttcggcgtgtcggcggtgacgatccgtgccgacctgacccacttcgaatcgcagggcctggccaaccgcacccacggcggcgcgaccttggtgcgcacgccgccgcaggaacaggacatccatgagaaggacgcgctgaacctgccactgaaggaatcgatcggtgcgcgcgctgcgcgcctggtgcagccgggtgacaacatcatcatcgattccggctcgaccacgatgacgctggcgcgccacctgcgcgcgcatcgcgacgtgacggtgatgaccaacggcctgaacatcgcctgggaactggccaatgccgcgggcatcaccgtgctgctgaccggtggcctgctgcgccagcagtcgctgtcgctgcagggcagccaggccgaagccagcctcaactcgtacagcttcgacaccctgttcctgggcgtggacggcctggacctgcagttcggcctgactacccacgacgaggccgaagcccgcctcaaccaccgcatggtcgagcgtgcgcgccgcatcgtggtgctgaccgatgcctccaagttcggccgcgtcagcctgcaccgcatcgccctgctggaccagatccacgccatcatcaccgacgccggcatcgacgatgcaacccgcgaagggctgcagcggctgggcatcgaagtgatcatcgccgagcccaccgcatgaccgacacccgcaccctgcatggccgcatcctcaccccgctgggctggcggcgcgggcacgtccacttcgattcacgcgtgcgccggctgcaggtggacgaccacagcggcgccgacgacctgcagctgccggtgatcctgcccggcttcgtcgacctgcatgtgcatggcgcggccggcgtggacctgatgcagggcggcgacgtggcacgcaccatcgcccgcacccatctgcgcttcggcaccaccacgctgctggcgaccaccatgaccgccgggctggacgagatcgagcacgcgctgcacggcgtcgctgcggcaatggcggcgcctgataccgacgccgccagcatcgtcggcgtgcatctggaaggaccgttcatcagcccgcagcggctgggcgcacagcccaatcgtacgatcgaggcgacggtggcaatggtgcagcagctgcacgcgctggcgccgatccgggtgatgacgctggcgccggagatcggcgagcacaccgcgttgatacccgcgctttcggcgatgggcatccgcgtgcagctgggccacagcgccggcacctacgaggagggcgtggcggcgctgcaggccggtgcctccggtttcacccatctgttcaacggcatgaccggcgttgaccactatcgcccgggcattgcggcggcggcgctggcgcatgcgcagtacgccgagatcatccccgacctgcagcacatccaccccggcgttatccggctggccgcgcgcgcgatcccgcgcctgtacgcggtgaccgacgcgactgccgccaccggcatgcccgacggcgagtacgcgctgggcgagcagcgcgtgcacaagtgcggcggctgcgtgcgcctggcgacgggttcgctggccggcagcgcactgaccatggaccaggcgctgcgcaacctggtgcgcgtcggcctggacctggccgacgcctcgcagcgggtttccaccttcccggccgactatctgggcctgggcgatcgcggccgcatcgcgcccgacgcccgcgccgacctggtggtgctggacgccgaactgcgcctgcagcaggtggtcattggtgggcgcgtggtcgatctgacctgacgcaagcgatgcggcccggatgccgcgcgggctccctgtagagccgagccatgctcggctcaccgcgcgaagcgcggcatggggaacctcgatatcggaacggaaagcagccgagcatggctcggctctacagaatgcactctgcgacgaacctccgccgggcctggcccggcgctaccacaggaactgccgatgactgcaagcaccgccccgcgctggcccgtacgctacctgctcttcatcggcggcctcggcggcctgctgtacggcatcgacatcggcatcatcgccggtgccctgccctacctggaggcaacggccagccacgcctggcagctcagcagccagcaactcggcttcgtggtggcggcggtactgctgggcagcgtgctgtcctcgctgttcgccggaatggtcgccgacctgatcggtcgccgcggtgcgatgctgctggccggcctgctgttcaccgcgtcgattccgatcatggcgctggcctcgggctacacgccgctgctgctcgggcggctgctgcagggcatcagtggcggcctgatcggcgtggtgattccgctgtacctggccgaagtgctcagccccgagcggcgtggacgcggtgcggcgatgttccagctgctgctgaccatcggcctggtgttggcggcactgatcgggctgtaccacgcacatgcggtggatgccgccgccgaagccgtgcgctcgctgccgctggcgcagcaggcgcaggaactgttcacggtgaaggaccaggcctggcgcaccatcttctggagctgcctggcgccaggcctgctgttctgtgccggcatcttctggctgtccgaatcgccgcgctggctggtgcgccgcggccgcgtcgatgatgcccgccgcagcctgcagcgggtgttgcctgctgccgacgtggaacccacccttgcacagatccaggcgccggaatcgagcagcagcgacggcaagcgcgacccactgctcagccgccgctacgtggtgccgttcgtgctggcctgcgtggtgctggcctgcacccaggccaccggcatcaattcggtgctggcgtacgcggtgaacatcctcaatcaggccggcctgtccggctcggtggccaacggtgccgacgtggcgatcaagctgctcaacgcggtgatgaccgtggtcgcgctgctgctggtcgaccgcaagggccgcaagttcctgctgatgctcggcagcggcggcatctgcgtggccctgctggctgccgccacgctgttcttccaggccgagcgtggccgcgccgacgtgcagccgcaactgcaggcggcggtcagcggcgacggcctgcggctggtgctggacgacgcacagtggcagcgcctgggcggtggcataaacagcgaaggccggccgatgcagctgaccgtgtcgtacgcctacggtgacttcaccaatgtgcgcgccctgcgcagcgacagcctgaccgaccgcgagctgcgcatcgagcgtgccgggaccgtgcagccggacagtgtgatcggcgcgttcttccgcaagctgcatctgaacccgttcgccgacccggccaaggccgcacaggcaccgctgcgcatcgagcaggcccgcatcggcccggtgccgccgccggcgcatggctgggcggtagccgcctgcatcctggtattcgtcgcgttcttcgcggtcggccccggcgtctgcgtgtggctggcactgtcggaactgatgcccaatcgcatccgctccaacggcatgagcatcgccctgctaatcaaccagttcgtgtcgaccaccatcgcggcgatcttcctgcccacggtgggccactacggctacgccagcatgttcctgttctgggcggcgtgcacgttcgtgttcttcctggtagccgcgttctggctgccggagaccaagggcaagtcactggaggagatcgaggcaaggttcgcacggtagcggtcgaccttggtcgacctccgcgcgtagcgcggtggtgttggcgcgcccgtcactgaccggtgatgtgcctggccagcgcctgcgcctcggcaatgctcggcagcccgctcagcatcatcgattccccgaaggggcctttcaccgtcgccaccatcagcacgcggccgtccacgctgatcgccgcgcgctggcccaccagggccgaggtgccatcgtggatgcgctgatgcgcttctggccgatagcggatctgcaggcctggctgcttggcatcgtccagcacgtagcgcacatcggcgatgtccacactgccggcaatcggcggctcgcgcagggccagggtttcaccttgccagtgcgccggagtgccgttgccagccgcatcgaccgcgctcaggcgcacgtccacgccggcgcgcggcgcatgatccttgcctgccagcgcaccgggcgtggcacccggcatgcatccggccagcaccagcgccgcgcccagcaggagcggacgcgcgcccctcatttcagcttccgcagcttgaacgccaccagcacctgcagcagcccgtacagcaggctgccaatgccgatccacagcgtggtcaccgccacgcctgcgtatggattggccgcgaacagcagccccagcaccaccgccagcacgccactgaggatcagcagccactcgccctggatctgcttgcgcacgcggatcgcgaagacgatgcgatagatgccggctaccagcagccacgccgccaggaacagcaccagcacgctggcggtggccagcgggttgatcaccgccaggatgccgaagcccagcgaagcgatggcatacagcgccagccagccgcgcgaggcgccgctgccaccactgatcagtgcgaacaggctgatgacaccttcgatgatggccatcacgcccagcgtccaggccaatgccatggctgcggacagcggccaaccgatggcgatgatgccgaagccgagcgcgaccaggccatacagcagcaggatccaccagctgcggccaaccgctgacaacaagggagacaagggggaattcatggtcactccttcgatccggaaccgggttcatcctagcccgtggcgatgaagggagcgatcacggcacccgcgcgcacacccatacccgcacctctctggcgcccacgcagcgcagggtttcggcgatttccatcaccgtgctgccggtggtcatcacgtcgtcgaccacggtcagatgcgtgggcaccggcccgtggacatcgaacgcatcgaacaggttttccctgcgctgttcggccgtgcgttcggactgcggtgcggtgtgccgccgccggtacagcccctgccagaccggcaacggcagcagccggcagagctcggcagcctggttgtagccgcgctggcgcaggcgccggcggtgcagcggcaccggcaccagcggcgggcaggaccagggcggtggtgcgcgctgcatcaactgcgccagcaggcgaccggccgccaggtcctgatggaacttgtagcgcagcagcagctggtccaccggcggcaggtacagcaggctggcgtgggtggccgtctgcggtggtgcttcctcgcggcagctgccgcagacgatcaggccctcatccggcaacggcagtgcacaccgcaggcaggcgcgaccggcccagggcagtccggcgaggcaggcgcggcacagatcgagatcatcatggcccggatcgccgcagaccaggcagcgcagtggcagcaggacacccagcagtgcgcgggagacacgggttgccgaatgcaggagatcaatacgcattgcccatgcttcatcgcgctgcccatgtgcggccatcggcgaagcaccgatcgcagtgtcgggactgcccgcaactgcagagggtgctgccgatcaggaaaggcgtccgccctgcccaggcccggttgatgcaacggccgacgccgtcaacacctccgccaacccacgatagatcggcacccggcataccagaccggacacgccccgcgcgatcagcaccgtggccaggatcggcaggagcagatcgccgctgtcggtcagctccagcgagatcaccgccgaggtcagcggtgcctgggtgacgccggtcaggtaggcgcacatgcccagcagcacgaacgcgcgcggatccacgcccggcatcagcaccgccaggttgtggcccagccccgcgccgaccgccaacgcgggcgagaacaggccgccgggtatgccggccacgtacgatgccaggttggccagcagcttcatcaacccgaactcgtggccgaccaacgcctgcccctgcaccaggctgcgcgcctgttcgtagccggtgccgaacgcgccgtcgccgaacgtcaaagccagtgccaccaccgccaggccgcagcctgcggccagcagcaccggatgccgctggcgcagctggcccagccaacgcgggcggcccgccgcactggccagcaccgcgcgcgcgaacaggccgcccagcaacccggccaccacgccgcacagcaggatcgccagccagccctgccccagcggcaaccgcgcgctcacatggccgaagtaggtgtagttgccgagcaggcccagcgacaccacgccaccgacgatcaccgccgtcagcagggtgccggagaagcgatgctcgaaacggccgctgagctcctcgatggcgaatacgatgccggccagcggcgtgttgaacgccgcggcaatgcccgctgcaccgccggccagcaggaagtgcgagagctcgcgaggatccttgaagccgaaccagcggccgaacaggtacatcaggctggcacccacatgcaccgtgggaccttcgcgtccgacggacgcgccgccgagcagcgacaacgaggtcagcagcagcttgccggccgagaccgcaggcgaaagattggtcttccggaatggctcatcgggcttgtccaacgcagcgatgacctgcggaatgccgctgccccgcgtgggcttcagcacgccactggtcaaccaggccagcagcgcgaagatgcccggcgtgagcagcagggcccaccacggcgagtgcgcggtgatgcgctggaacagatggaaggccgcgtcgctggccttggcgaacaggatggccaccagcgctacggccacagcgccgccccagagcgcggcgcggcggcgccaggcctcgctgagaaccagcgcggtgatgcggccgcggaggcgatggagatcggtcatggggcacagtctgcgcgccagcgcttgcgttgggcagcggttattgtggctgcaggccttgcaggatgcggtgaaacgcgcgagtgcgggtgctcgccgatagcacctgccctgtgcagctacctatgcctgcaggcgctcccgccaccggcgcttctccaccgcacgcacgttgggctggggccgcaggtagacgtggtagccgacgaggcggaaatctgcgggtcgctccagttcacgctcgctggcatgcaccagcgtctcatccagatcgagtatcagcagctttccgccctgcggcatcgtgtccggttccatgcgcatccttctttcattgcctcagctgccgccatcttctggatggacttcagcatgtgtccttccagcaggtagatgtaagcacagttccagccaggtcctggtgggcgcaagcctactgccggacgcgcacttcgcaacagcccatccgcgtgaggtcgccctgtgcctgcaacatgccccgttccaccagcatgcgtacacgccctgcatagaacacatcgggaattcccgatcggcacttcggctgcagcgacatgaccatgcccacaatgtaggcgatctttcggaactgcccgtcgcagagggagaacagctgctcatcgatcgaggcgatgtcctcgctggtcagcgcggcgatgttctgccgcgcctggtcagtgagatgggcatcgttgtcggagcgctcgtccgtatcgcgcaggcagccattgatggccaacaggcgaaccagcacatagtggccgaaagcctcgagctcctccttgggcaacgtcgccggatcgagctgccctgccgggtagtccttgaaggtcacgaagacgtggttcttccactgccctggcgtgtcggactggcgcagatcatccagcaccacgcgcaggccgccgtcgggcagttcggcaagactgcacagcactgcgtcgcggcggatcgggtaggactggtagctgttcatggcacgtgctcgcgcgtccgtatgcagcaatgaacttacaccgtagcgcccattcatggcggtcaatctatgtaaaccatattggaggcagacaagttgacagggctcaccaacccacccacactgccgccctcgctccactcgtacccaaggtcccgccatggctgctgccatccgccacgactggcaacacgacgaactgcaggcgctgttcgatctgccgttccccgagctgctgttccgcgctgccgcagtccatcgcgagcacttcgacccagcgcaggtgcaggtgtccacgctgttgtcggtgaagaccggcggctgcccggaagactgcgcgtactgcccgcaggcacagcgctacagcaccggggtgaacgcgcagaagctgatggacaccgacgcggtgctggccaaggcacgccaggccaaggctgccggcgcatcgcgcttctgcatgggtgccgcgtggcgatcgccgaaggaccgcgacatcccgaaggtggcggcgatgatcgccggggtgaaggcgctgggcctggaaacctgcgccacgctgggcatgctcagtggcgagcaggcgcgtgcgctgaaggatgcgggcctggactactacaaccacaacctcgacaccgcgccggactactacgattcgatcatccacacgcgccagtaccaggaccgcctggacacgctggcgcacgtgcgcgatgccggtctgaaaacctgctgcggcggcattgtcggcatgggcgagacgcgcgcgcagcgcgtgggcctgctgctggcgctggccacgctgccggcgcatcccgattcggtgccgatcaacaagctggtgcaggtggcgggcacgccgctgcatggcagcgccgagctggatccgttcgagttcgtgcgcatgatcgcggtggcacgcatcgccatgccgcgttcgatggtgcggctgtcggccggtcgcgaggcgatgagcgacgaactgcaggcgctgtgcttcgtggccggtgccaactcgatcttctacggcgacaagctgctgaccaccggcaacccggagagcgagcgcgacctggccctgttcgcgcggctggggttgcagccgatggcggtgcaggtggatgccgagggccacgaccacggcggcaccgtgcacgctgatatcagcgccgatgcgcccgcctgtggctgcgctcacgcggcctgagacgggccgcaagcaggcgccgcggcaacgcgctaccctagccgccccgtcgccgcattcagccgccatggcccgccccgacctgaccgcccgcctccacgcccaacgcgccctgcgcgatgcccaaggccgtcgccgcacgcggcgcacggtcagccgtcgtgatggcgtccgcctggaggtggacggccagtggctgaccggcttctgcagcaacgattacctgggcctggcccagcagttcagcgtggtcaacgcattgcaggatgcggccgcacgcgaaggctccggcgcgggcgcctcgcatctggtctgcggccaccacgctctgcatgaggcgctggagcgcgaagtggcggagtggctgggctacccgcgcgcgctgctgttcggcagtggcttcgccgccaacctggccgtgcagcaggcgctgctgagcgaagagaacgatgtgtgcgtgcaggacaagctcaaccacgccagcctgctcgatgcgacgcggctggcgggtgcgcgcctgcgccgttatccgcacctcgacgccgaaggcgcgatgcgccagctcaagcacgcgcccgacggcgcggcgatgctggccaccgacggcgtgttcagcatggatggcgacatcgcaccgctgcgtgcattgtcgctggtggcacgcctgcagcaggcgctgttctatgtggacgatgcgcacggcgtgggcgtggtcggtgatggtcgtggtgccgtggccgccgccgggctgggcgtggacgatgtgccgctgcagctggtcacgctgggcaaggcactgggcggttccggcgcgctggtgctgggccgcgacgacctggtcgagcacctggccgaaaccgcacgcccgtacatctacaccactgcgatgccgccggcgctggccgccgcagcactggaagcggtgcgcctggcgcgccgtgacaactggcggcgctcgaaactgaccgatctgatcgcgctgttccgcggcgaagcccgccgccatggcctggacctgatggcctcggaaacgccgatccagccgctgctgtgtggcgacgaccatcgcgccgtggcgatgtcccaggcgttggaacaggccggttggctggtcggcgcgatccgcccgcccacggttcccgaaggcaaggcgcgcctgcgcgtcacgctgtccgcgctgcacacccccgagcaggtgcgtggcctggtcgaagccattgccagcgcgcgcgatcgcgtcgacctggccgcgcgtgaggccgcgccaccgccgctgcctgtcttcgcctgagcctgttgccgtttccccatgcatatcgacgtcaccggccaggggccggacctggtactgatccatggctgggccctgcagggcggcgtgttcgcgccgttggtgcaacgcctggccgatcacttcaccctgcatctggttgatctgccgggccatggccacagccgcgaggacaccacgccgctgcgcctgccgttcgtggtcaatgccattgccgcggccacgccgcctgcggtgtggtgcggctggtcgctgggcggcctgttcgcgctgcacgccgccgcgacactgccgaaggtgcgcgggctggcgatgatcgcggccacgccgcgcttcgtgcgtggcgaggactggccgcatgcggtggagccggcggtgttcgagcagttcgggcgcgagctggccaccgacttcggtggcaccctggaacgcttcctggcgctggatgtcatgggctcggcacacgcccgcgaggagctgcgcacgctacgccagcgcctggtcgagcgcggtgcacccaccgaacgcgccctgctggaaggcctgcgcctgctggaaagcaccgacctgcgtggcgcactgccgacgctggccaagcccagcctgtggatcgccggccagcgtgaccggctggtgtctccggcggcaatgcaggccgccgcggcactggcccccggtgcgcaggcgctgaccatcgcccacggcggccatgcgcccttcctcggccatgccgacgaggtggccgccgccctgcaacacttcgttgccggcctgtcaccggccgatggcggacaatgagcgccttcctcattccgcaggattgatgcatggatctgggtatcaacggccgctgggcactggtctgcggcgcaagcaaggggctgggcctgggctgcgcacgcgcgctggtgcgcgagggcgtcaacgtggtgatcgtggcccgtggtgaggctgcgctgcaggccgccgccgaagcgctgcgcgctctgcccggcgccgccgaagtccgcgtggtcgccgccgacgtgaccaccgaggccggtcgctccgcagcgctcgccgcgtgcccgcaggtggacatcctggtcaccaatgccggtggcccgccaccgggcgacttccgcagtttcgagcgcgacgactggatcgccgcactggacgccaacatgctggcgccgatcgcgctgatccgcgccaccgtggacgcgatgatcgcgcgtggcttcggccgcatcgtcaacatcacgtcctcggcggtgaaggccccgatcgacatcctggcgctgtccaacggcgcgcgcagcggcctgaccggcttcgtcgccgggctgtcgcgccgcaccgtggcacacaatgtcaccatcaacaacctgctgcccggccagttcgacaccgaccgcctgcgcgccaacttcgcccacagtgcgggcaaggacggcaatgctgccgaagtggccgaacgccgccgccagcagatcccggccggccgcttcggcacggcggatgaattcggcgcggcctgcgccttcctgtgcagcgcacaggccggttacctcaccgggcagaacctgctgatcgacggcggcgcctaccccggtacgttctaagagactttcgcaatgccgtcccacttcgatgcccgccatgtccgccgcgcgttcgcccgcgccgccaacagctacgacgccgccgccgccctgcagcgcgaggtgcaggcgcggctggtggaatcgctggactacctggaggcacgcaagcccgaggtagtgctggacatcggcgcgggtaccggccacgccagtgcgctgatgaagaagcgctggccgaaggcgcaggtgatcgcgctggacgtggcgctgccgatgctggaccaggccaagcgccaggccggctggtggaagccgttccagcgcctgtgcggcgacgccgccgcgctgccactggccgacaacagcgtggacgtgatcttcagcaacctgtgcctgcagtgggtggacgacctgccggcggtgtttgccggcttccgccgcgtgctcaagcccggcggcctgctgctgtgctccaccttcggcccggacacgctggtcgaactcaacgaagcgttcgcggccgccgatgaccgcccgcacgtgagccgcttcgcgcagatcgcccagttcggcgatgcgctgatgatggccggtttccgcgacccggtgctggaccgcgacctgttcaccctgacctacgacgacctgccctcgttgatgcgggagctgcgcgcgatgggcgcgaccaatgcgcgggtggaccgccgccacacgctgaccgggcgtggccgcttcgccgcggcggcagcggcgtatgaaccgatgcgacgcgccgacggcaagctgcccagcagctgggaagtgatctatgcccacgcctgggcaccggacccgggcgcaccgatccgcgaaggcgggcatgacgtggcctcggtgccggtgtcggcgattccgatccggcgcaagcagacctgatcgcccggtcgtgccggccgctggccggcacctcacgattccacggtggacctctgccggccagcggccggcactaccgtatgccacaccgtgcgcgaatcgcccgggtaggtgccgaccttggtcggcacccacctaattcgggcgatgtcggcgatcccgatccggcgcaggcagacctgatcgtctggtagtgccggccgctggccggcaacctcacgattccacgatggacatctgccggccagcggccggcactaccgcatgccacaccgtgcgcgaatcgcccgggtaggtgccgaccttggtcggcacccacccaatccgggcggtgtcggcgatcccgatccggcgcaggcagacctgaccggctggtagtgccggccgctggccggcaacctcacgattccacgatgggcgtctgcccagatcaggtttccgcctcaggtgttggccggcgaactcagcggcggccgcaccaggtcgcggtggaagaaatagatttcctgcaccaggaagcgccagctggtgtggaagctgcggaagcgcgtgctgggcgtggacgaggccagcgcatcgatgcccagcgccttgctcaggcgcagcgcgcgcgccatgtgcaacgggtcgcttacgatgatcacccggtgcaggtcgcgctggtccatcagccgcttggcctcgaccaggttctgcacggtgttgcgcgaggcggtctcgatcaggatcgcatcgtccggcacgccatgcttgagcgcatagcgccgcgccacctgcgattcggaaaagcgcgcgccggtgccaccgtagccgccggtgaagatcagcagtggcgcgtaccgggcttcatagagatccaggccatgacggatgcgttcttcgaataccggcgacggcttggcgtcataggccgccgcaccgagcacgatgatggcgtcggccttggctgcctggtcgcgctcccccacccagacgatccaggcggtcacgcccagcagccagaccaccagcagcacgaacagccgccacagccagcccagcgggccggtgcggggccggcgccggtcgcggctcaaggcgccccccaacgcagcgcgggcaggtcgacattgccaccggacagcaccaggcccacccgcaggccggcgaaccgctgcggctgtgccagtaccgcggccagcacggtggccgaggacggctcgaccacctgcttgagcacctcccacagcaggcgcatcgcggccatggtggcggcgtcgtcgaccacgatcacctcgacgccggccgcgcgcagcagcgcgaagttgggggcgccgatcagggtacgcaggccgtcgcagatggtgtcaggggtgaacgcgccctggcgctcgcctgcggccagcgagcgcgcggtgtcgtcggcaccggccggttcggccagcaccagccgggtctggggactggcgaactgcagggcccgggcggtaccgctggccaggccgccccctccgactgggactaccagcacgtcgaacggaccgtcgctgtgcagcagctccagggccgcggtgccctgcccggccatcaccgccgggtccgcatagggatggaccagggtcgcgccggtatcggcctgtactttggcgcaggcggcctcgcggtcggcgatggtcggcgggcagcgccagagcgtggcaccgtggcgggcgatgttggccagcttggccgccaccgcaccttcgggcaccaccacgtggcagggaatgccacgggtgcgcgcggccagggccagggcagcgccgtggttgccggacgaatgggtgaccacgccggcacgggcgcgatcggcatccagcgaccacaccgcgttgcaggccccgcggaacttgaatgcgccgccgcgctgcaggtgctcggccttgaacgccagctgcgcgccggccagcgcatcaagcgtgcgcgagcgcagcaccggggtcacgctggcgtgcggcgcgatccgcgcagcggcagccaggacatcgtcggcacggggcaacagtgaatcgctcatgacgcaagattaacgtatggccccacgctggcgaccccggcacaggtcatgccagcatgagggccttcacctccattcatcctggccagtgaagttaagggccgattcaacgcctgcgcacgaagctgactgcacaacccgtcctctggggggacccaccatgaaaacgcgcctgatgcttgccggtggcctgttgctggccctgaccggctgcaccacctacgactatgtcggcggtggccgcagcggcagctactaccacggtgcgccgtcggtggagtaccgctacccggccggctatccctacaactacggctacccttactacggcggctatggcggctactacggcggctatggcaatccgtactactcgcgcccgatctaccgcccgccgcacaaccaccgtccgccaccgcgcccgcccggcaacggtggcgagaaccgtccgccgccgccgccgcggccgtcgtacaacggcggttcgccgtggcggaacatggactcgatgcgtcgcccgccgcagtcgaacatccagccgtcggcgccgccaccgccggcccgtccgaccccggcgccgagcgcgccgaggatgaacggttccccgtggcgcaacatggatcgtgggacgcagcgcacagttgagcgctgaaccgtcttgcatttcacccggtccaggttgcactctacggaaccggtgacggcccgcgtcacaaagtgacaaaaagcgagacgggccgccgcaaaaatctctacgtcgatatccgacaggaacatctggatcccccctgttccggccctgtcggatgtcggcacctctgaagacagacggccccgcactgcggggccgtctgttttgccgggtcgccaaccggagagagccccagcgtcggtagatccacgccatgcgtggtcgggcctttcccggcaatcccaaaaaaacagggccggacagtcccccgactgccggccctctgctcccccaccgtgcgcctgtaccggcccctgttccaattccggtcacgagcgcctgcggcgccagccacggtgggtgctattgggttatctgcaataatcctgccaactttagggctgatttcgacgccggccggccggcaccgacgccgcggccccgaatggcgctaaaatcgccaccccggcgccgccccggccgcgcctgcccccagctgaacagccccatgaacccgtccttccatcgttacgacgtcatcgtcatcggcggtggccacgccggcaccgaagccgcgctggccgcggcccgtaccggcgtgcgcaccctgctgctgacccacaacatcgaaacggtgggcgcgatgagctgcaacccggccatcggaggcatcggcaagggccacctggtcaaggaaatcgacgccctcggtggtgcgatggcgcatgccgcggaccgtgccggcatccagtggcgcaccctcaacgcctccaagggcccggccgtgcgcgccacccgctgccaggccgaccgcaacctgtaccgcatggcgatccgcgccatcgttgaaggccaagccaacctgaccgtgttccaggcggccgtcgatgacctggtcatcaacggcgacgccgtgcgcggggtcatcacccagaccggcctgcgcttcgatgccgaggccgtggtgctgaccgccggcaccttcctggccggcaagatccatgtcggcccgacccagtacgccgccggccgcatgggcgacccgccggccaccacgctggccgcgcgcctgcgcgagcgcccgttccaggtggaccgcctgaagaccggcacgccgccgcgcatcgacggccgctcgctggactacagcgtgatggatgagcagcccggcgactcgccgcgcccggtgatgtccttcctgggttcggtggacgagcatccgcagcagatcagctgctggatcacccacaccaccgaacagacccaccagatcatccgcgacgcgctgcaccgctcgccgctgtacagcggccagatcgaaggcatcggcccgcgctactgcccgtccatcgaggacaaggtggtgcgcttcgccgagaaggccagccaccagatcttcgtcgaacccgaaggcctgggcatcgtcgagatctaccccaacggcatctccacctcgctgccgttcgacgtgcagctggagatggtgcgcagcatccgcggcttcggcaacgcgcacatcacccgcccgggctacgcgatcgagtacgacttcttcgatccacgcgggttgaaggcttcgctggaaaccaagctggtcaacggcctgttcttcgccggccagatcaacggcaccaccggctatgaagaagccgccgcgcagggcctgctggccggcctcaacgccgcacgccaggtgcgtgggctggacggctggtgcccgcgtcgcgacgaggcctacctgggcgtgctggtggatgacctgatcacccacggtaccaacgagccgtaccgcatgttcaccagccgcgccgaataccgcctgcagctgcgcgaggacaacgccgaccagcgcctgaccccggccggccgcgagatgggcctggtggatgaccagcgctggagcgcgttcgagaccaagcaggccgccgtcgccgccgagcgcgcgcgcctgggcgcgctgtgggcgaccccggccaatgcgctgggccgcgaagtgcaggacacgctgggcgtggcggtcagccgcgaaaccaacgtgctggacctgatcaagcgccccgagctggattacgcgcagctgatgcaggtgccgtcgctgggcccggccgtggccgacgccaaggtggccgagcaggtggagatcggcgtgaagtacgccggctacctggaccgccagcgcgaggagatcgagcgccagcagcggcatgaagccacgccgatcgctgaagccttcgactacgccacggtgcgcgggctgtcggccgaagccctgcagaagctggaacgcgtgcgtccgcagaccatcggccaggcgcagcgcatcccgggcatgaccccggcggcaatctcgctgctgctggtgcacctggagcgtgcacgccggggccgcgtggcgtaggcagcaccgtccgcttctggtgggtgccgacttgggtcggcacatgaatctgccttggtgggtgccgaccttggtcggcacgaatcatcagatcgcgacactccatgcttccgtgccgaccaaggtcggcacctaccagagcagggcgcgttaccgtgcgtccgcgccaccgcccagcaccttgaacagcgtcacccggtttcccgcttcctgctgctgcagcgcgatcaggtcctgctgcgcggcaaacaggctgcgctgcgcatccagcgcctgcagatagccgtccagcccggtgcgatagcgcgcctcggccagcgtgtagctgcgctggctggcggcgaccagtgcccgttgtgcctccatctgcgcgcccaggtgatcgcgcgtggccagggcatcggccacttcactgaaggcctgctggatcgccttctcgtactgagcgatgccgatgtccttgccaatcttcgaggcatccagtgaggccttcaacgcaccggcgtggaagatcggcgccgtgatgctgggcgcgaacgaccagccgcgggtgccggccgagaacagcgtcgacaacgcggtggagctgtggccgtagttggcagtcagcgtcagcgtcgggaagaacgcggcgcgcgcggcgccgatatcggcgttggccgcctgcaacgcgtgttcggcggacagcacgtccggacgctgcagcagcacgctcgagggcaggttggaaggcaacggcgccagcgccacggtgccgtccagtgcctgtgcgctgggcagcaatgccgcgtccagcggagcacccaccagtaactgcagcgcatcacgatcctgcgcctgctgggtctgcagcctggccagcgcagcgcgcgcggcgtccacactggtctgcacctgcgacaggtccaggcccgaggccaggccttgtgcatggcgggcctcggtgcgctgcagggtctgctgctgactgtccagcgtctgccgggtgaacgccagcgactgctcgtcggccgccagcgccagccaggccgtggccacttcggcgaccaggctggtgcgcgccgcacgctggttctcggcactggccagccagttctgcagcgcctcgttcttcaggctgcggatgcgcccgaacaggtccagttcccagctgctgaagcccacctgcacggcatcggattcggtcacctggctgacgccgatctcgctgttggcatcactcacccgcgaacgggtcacgctgccgctggcatccaccgacggcagcagcgccgcgcgctggatgcggtactgcgcgcgttccttctccacctgcagcaccgccacgcgcaggtcgcggttgttctgcagtgccagcgcgatgacctgctgcaggcgcggttccaggaacacctcgcgccagcccggcatcgccagtgctggcccggtctcgccggtggcggcattggcgaactgtgccggcaccggcgcctcggggcgctggtagtgcggggccatgctcacgcagccgcccagcacggtggtcatcgttgcggccgccagggcgcgcaacagcatcggcttcatgggcgtgcctccggggcagtggcgtcggccggcgcgcggcccgggaacaggcggcgcaccagcaggtagaacaacggcacgaagaacatgcccagcaccatcgaggcaaccgtgccgccggccacgcccgtgcccagcgaacggcgcgcggccgaaccggcgccggtggcgaacaccagcggcaacacacccatcaggaacgccagcgaggtcatcacgatcgggcgcagccgcagatagaccgcctgcaggatcgcttcgccggtgcgcttgccctgctgctcgaggatgcgcgcgaactcgacgatcaggatgccgttcttcgcagccaggccaatcgtggtcaacagaccgacctggaagtacacgtcgttgttgaggccacgcaggttcatcatcagcacggcgccgaacacgcctaccggcaccgccagcatcaccgcgaacggtaccgcccagctttcatacagcgcggccaggcacaggaacacgaacagcagcgagatggcatacagcatcggcgcctggttccccgacagctgttcctggtaggccatgtccgaccaggcatggctgaagccttccggcagcgtgtcggccaggcgtgcgatctcggccatcgcctcgccggaactgacgcccggtgccggctggccggtgatctccatcgccgagacgccgttgtagcgctgcagcgcggccggcgcactggtccagtgcgcgctgaccagcgacgacagcggtaccatctgcccggcctggttgcgcacgctccagcgctcgatgtcctgcggctgcatgcgggcttcggccgtgccctggatgaacaccttcttgatgcggcccttgtagatgaagttgttgacgaagtcgccacccagcgcggcgttcaaggtgtcattgatgtcctgcggattcacgcccatcgcctgcgccttggcgtcgtccaccttcaccgcgtacaccggcgcgtcttccaggctggcgtagcgcacgttgaccagcttcggatccttggcagcctccttcagcagcgtgttgcgcgcggccacggcggcggcatggccggcaccgccttcgtcctgcagttccagggtgaagccaccggcatcgccgaggccgaggatggccggtggcgaggtgatgaacacctgcgcatcgggcacgctggccatggccgcgctcaagcgcgcggcgatggtatcggcatcgtccttgcggtcgtcccaatccttgagccggatgaaggcctggccgacgttctggccactgccgctgacactgaaacctgcggtggcctggattgacagtacgctgtcgtccttcaccgcggcggcgctcaggcgatccatcacggcacgggtctgctccagggtggacccggcgggcagcttcaccagcgcgttgagcatgccctggtcttcatcgggcaggaacgcgcccggcaggtgccacaacaacaggccggtggccacgctcagcaccaggtagcacagtacgcccagcgtgcgccggccgaggaagcggtcgacgcgatggcgcagtcggttggaggtgcgctcgaagcgatggttgaaccagatgaagaacttgcccagcaggcccggctcgccagcgtggtcgccatgcggatggccgcccttgggaatctggtgcaggatgctgccgcacagcgccggggtgatggtcatcgccaccagcaccgacaggatcatcgcagcggcgatcgtcaccgagaactggcgatagatcacgccggtgacaccgctgaagaacgccatcggcaggaacaccgcggtcagcaccagcacgatgccgaccagcgcgccggtgatctggcccatcgccttcaacgtggctggcttcggtgccagcccttcgaaggtcatcacccgctccacgttctccaccaccacgatggcgtcgtccaccagcaggccgatggccagcaccagcgcgaacatggtcagcgtattgatcgaatagccgaaggcggccagcacgccgaaggtgcccagcagcaccaccggcaccgcgatggtcgggatcagcgtggcccgccagttctgcaggaacaggtacatcaccagcacgaccagcgcgatcgcctcgatcagggtgatcaccacttccttcagcgagatggtcacgaacggcgtggtggtgaacgccacgtggtaggtgtagccatgcggccagtacttctgcagctgctgcagtcgtgcctcgacggccttggagacggcgatggcgttggcaccggcgttgagctcgatgcccagcgaggccgacggcttgccgttgaacgtgctgatgctgtcatagctttccgggcccaggccgatcgtcgccacgtcgcccaggtgcaccacgctgccattggcatcggccttgagcaccacctgcgcgaactgctcgggcgtgtgcaggcggctgcgcgcggtcacggtcgcgtccagctgctggcccttcagcgccggctggccaccgagttcaccggccgacacgtcggtgttctgcgcctgcagtgcggtctcgatgtccgacggcatcagcgcgtactggcgcatcttttccgggtccagccagatacgcatggcgtattcctggccgatcggctggatgttgccgacaccgctgacgcggctgatctggtcgtcgatgcgcgcttccatgaagttggcgacatcgaagttgtccatgctgccgtcttcgctggtgaacgacagcacctcgaagatcgaaccgctggacttggtgatggtcaggccgttctgctgcaccgcctgcggcagcgtcgccatcgcggcctgcagctgattctgcacctgcacctgcgcggtgtccgggttggtgccggtggcgaacaccaggttgacctgcgccgagccatcggaagcactggtcgaggtcatgtacatcaggtggtccaggctctgctgggactgctcgatgacctgggtgaccgcgttttccacggtctgcgacgaggcgccggtgtaggtggcgcggatggtgatggtgggcggggcgatctgcgggtagcggtccaccggcaggatcaggatcgcgagcaggccgagcaggctgaccgcgatggcgatcacccaggcaaagatcggccggtcgatgaagaaacgaaccatgcgcggcaggcctcagtgcgacttttcgtcggtgttgccgttcgggtcgaccgccggcatcgccgccagctgcgccgtggtggccgccaccgccttcacctgctggcccagcgctaccgcactgccgttgctgacgatcacccgctcgccagccttcaggccctgcgtgatctgccactggttgcccaccacctggccggtgctgacccgccgctcgaccacgcgatcctttgcgtcgagcaggcgcagcagcggctcgccacgttcattgcgcagcaccgccttctgcggcaccagcagggcacgcgcatcggtggccatcggcaacaccgccttcaggtacatgcccggcagcagcaggccctccgggttcggaatgaccgcgcgcagcaccacgttgccggtgcctggatcgactgcgctgccgacgaactccagcgtgccctcatgggcataggtgctgccgtcctccagcagcaccttcacctgggccttgccatcgatggccttcaccaggccggcgtcgagctgcttgcgcagcgccagcatctgcgtgctggactgggtcacatccagatagaccgggtccagccgttgaatggtcgccagcgccgcatcctggccggcggcgaccagcgcgccggcggtgacgctggaggtaccgatgcggccgtcgatcggtgcggtcacccgggtgtagtccaggttgatccgcgcggcctgcaatgccgcgcgcgcggcaatcacgttggcctgggcctgcttcagtgccgaggtggcatcgtcggcgtcctgcttgctggccgcgtccatgcccagcagcgtacgggtgcgctcggccttcggctgcgccgacagcacagcggcctcggcctgcgccagctggccacgcgcggtatcgaaggcggcctggtacggcgccggatcgacctggtacagcagctgcccggccttgacctgctggccttcggtgaacaaccgctggcggatcagcccaccgatctgcggccgcacctcggacacctcgaacggcaccgcccggccgggcagggtctgctgcagtgccagcggttgggcgcgggcggtgatgacgccgacttcgggggtggccggggcctcggtcctgcccgccgagcaggccgccagggccagcagcaggggcagcaacaacgcacgggggaagcggaacagcggacgcaggagtgacatggggggcgtgggggcctttcgttgacccgtgcacgctgccgtgaaagtgtgcagagaatatggagattgtgcgaccggctcagcgggcgcttgctttcggcgccgcatgcgccgctaatggcccggcgatggcgaagattcgattcaaattcggcctgaccgcgaagaccttcctcgcgatcttcaccgcctgcctgctggtgctggcagtgaacggcattgccagccgcgtggcgttccagaccggcttcctggactacctcaacgaccagggcgacctgcgcatgcagcgcgtgatgccacacctgcagcgcgagtaccgcacgcacggcggctgggagcatctgcgcggtgacagtgaccgctgggcgcggctgctgcgcccggacctgggccatgggcacgaggggcccgtgccgccgctgtccgaccagaccggggttccctcgcggctgggcctgttcgatgcgcagcatcggttcgtggccggcaacccggacgcgatcagcgacgacgagccgcacagtgtgcaggtggacggacacaccgtcggctggctgggcatggtgccgttccagaccgtcatcgccaccaacgacctgaatttctacaacacccaggtgcgcgcatggtgggtgatcggcatctcgctgctgctggtgaccgtagtgctggcctggctggtgtcgcgcgcgctgcgccagcgcctggccaagctggccgccgccacccaccggctcgccgccggcgactacgccacccgcatcgagcgcaccagcgatgacgagctggatgcactggtcaacgacttcaaccggatggcgcaggcgctggacgacaccgagcgcaaccgccgcgccttcatcgccgacatctcgcacgaactgcgcacgccgctggcggtggtgcgcgccgaactggaggcgatcgaggacggcatccgcccgctggaccgcgccaacctgggtgccctgcagggcgagatccgccagctgggcaagctgatcgacgacctgcacgacctgtcgatgacccagtccggtggcctggcctaccgcttcgccccgctggacctggtggcgctgctgcgtagcgagctcaatggcatgcgcgtgcgcttctccacggcggggctggcactggaagaagcgctgcccgccacaccgctgcaggtgtccggtgacgagcgccgcctgcagcaggtgctggccaacctgctggaaaacgcactgcgctatacccatggcggcggccgcgtgcgcgtgcaggctgcgcgcgtgcccgccggcgtgcagctgatcgtggaagacaccgcgccgggcgtaccggccgacaagtgcgcgctgctgttcgagcgcttctaccgggtggagagttcgcgcaaccgcgccagcggcggcagcgggctgggcctggccatcagccacaacatcatcctcgcccaccacggccatatccacgccgagccctcgccgctgggcgggctgcgcgtggtcgtcaccctgccggagtccgcatgagcctgtcccccgccgcgtccgcgaagatcctgatcgtcgaggatgagccacgcctggcctcggtgctgcgcgactacctggccgccgccggcatgaccagcgaatgggtggacgatggcggccaggtgatcgacgcattcgcgcgctaccagcccgacctggtgctgctggacctgatgctgccgcaacgcgatggcgtggacctgtgccgcgaactgcgcgccggcagcgacgtaccggtgatcatggtcaccgcgcgggtggaagagatcgaccgcctgctgggcctggacatcggtgccgacgactacatctgcaagccgttcagtccgcgcgaagtggtcgcgcgggtggtggcggtgctgcgccgttaccgcccggaccccgctgcacgcgccaacagcggcctgcatatcgacgaaccggcggcacgcgccacctggaacggcaagggcctggacctgacgccggtggaataccgcctgctgcgcaccctgctggccacgcccggccggatctgggcgcgcgatgagctgctcgaccgcctctacctggaccaccgcgtagtggtcgaccgcaccgtcgacagccatgtgcgcaacctgcgccgcaagctggccgacgccggcatggaaggcgaaccgatccgttcggtgtacggcatgggctacagctacgaaccctagccggtagtgccggccgctggccggcaaccgcagaattccaggtgcgtccattgaggttgccggccagcggccggcactacccgtgcgcaactgcgctacagtcgagcacgctcgacatcaacggatcacgactgcatggacgacatccacccgatcgcgccgggcaagcgcgccgccattctttccagcctcgccgacatcgaacggcgacacgacgtgcgcgttctgctggcgtgcgagtccggcagccgtggctggggcttctcttcgccggacagcgattacgatgcacgcttcatctacgtgcatcgccagccgtggtatctcaccgtcaacgagagcaccggccccggcgatgcgcagcgggacgtgatcgaactgccgatcgacgatgagctcgatgtcagcggctgggacctgcgcaaggcattgcgcctggtttcaaaatccaatccgacactgattgaatggctgcgctcgccgatcatctaccagcaggatcacaccgcagtgtcgcagctttggaaggcagctgagtcgttctattcaccactgggcacgtggtggcactacttcaacatggcgcgctcgaaccatcgcggttacctgcgtggcgaaacggtacgcacgaagaagtacctgtacgtgctgcgcccactgctggcctgccagtggatcgagcacgaacagacccccccgccgatggccttcgaggacctgctggaccggctgctgccgcacggcccggtgcgtgaagccatcgatgccctgctggcggttaaacgcgccagtgccgaggtcagtgccggaccacgcatcgcggcgatcagcgatttcatcgatcgtgaactggccatccggactgcgcaggcgccgcagctgcccgctggacacggtgatgcggcgtggctggatgagctgttccggcagatgctggccgagcacgcgccgatctgagcggctgcacctgactcgggtagtgccggccgctggccggcaaccgcagaattccaggtacgcccatgacgttgccggccagcggccggcactaccacgcaggtatcatcgcggtgaacgccctgatttccggagacaccgatgaacccgctgcgccccttccgcgacaagatgcccgtcctcggccagcgcgtgtacatcgatccggcctgcaccctcatcggtgacgtggaactggccgaggacgtatcagtgtggccgggtacgatcatccgcggcgacgtcaattacgtccgcatcggtgcgcgcaccaatgtgcaggacggcaccatcatccacgtcagccaccacagcccgtacaacaaggccggttacccgaccctgatcggcgaaggcgtgaccgtcggccatggctgcatcatccacgcctgcaccatcggtgattacagcctgatcggcatgggcgcctgcatcctcgatggcgcccgtgtggaacgccatggcttcgtcggtgccggagcggtggtcggcccgggcaaggtggtcggtgaaggtgagctctgggtgggcaacccggcccgcccggcgcgcacgctgagcgacaaggagatcgagtcgctgcactattcggccgaccactacgtgcggctgaaggacgaatacctgggctgaacggccaacgccgccatgcggctctgctaaagtctgggcccgaccaggacctgtcgagacccccatgcctgtggctgcctgccggagaggactccgccgcccacaacgaaggccatcgcactgatggccgcaccgatgctcgatacctaccgcgaggtggtgacgccggagggtgtgccgctgcagttgccggcggccggcccggtgccccgggcgatggcctggctgatcgatctgggcgtgcgcatcgcggtgctggtgctgatgtcgattccgctggcactgctggattcgttcggctccgggctcggcctggtgctgatgttcctggtttactgggcctacccgatcgtctgcgaagcgcggtggggccgcaccctgggcaagcgcgcactgggcctgcacgtgctcgcgcgcgatggcgcgccggtgggctggatggccgccatcacccgcaacctgctgcgcaccgtggacatgctgccgttcggctatgcactgggcctgatcagcagcctgttcgattcccacggccgccgcctcggcgacctggtggccggtaccgtggtggtgcatgcaccggtgctgtacctgccgcctccgcccaccatcgacagcgtgctggccccgccgcagccgctgcgaccggaagaacaggcggcgctgatggccttcgccgagcgcgcgccgcggctgtcggcggcacgccagcaggaactggccggcattgccgagccactgaccggcacccacggccaggtcggcgtgctgcgcctgtatgccatggccaactggctgctggggcggcgatgaagcaggaacagttcgtcgcccgctaccagcaggaatggcaggacctggaacactggctgctgctgcgcgccggtgcttcgcgccgcacgcggcgcaaggccagcgcgctcgcgctggacgataccgccttcccgcagcgctaccggcgcctgtgccagcagctggcgctggcccgcgagcgcggctacagcccgcagctggtgcagcgcctgcagcagttgatgcagcagggccacagcgtgctgtaccgcacgccgccgacgcgctggcgcggtgcgctggaattcctggtggccgacttcccgttgctggtgcgcagccaggcgcgcagcatgtgggtggcgctggcgatgttcgcgctgccggcgctggcctgcttcgtgctggtgcaggtctatccggacctgatccacatggtgatggacaaccgccagatcgccgagatggagcgcatgtacgatccggccgccgagcgcctgggacgcgacagcggcaccgactggatgatgttcggccactacatcctcaacaacatcagcatcgccctgcgtaccttcgccagcggcctgctggccggcctgggcacgctgctggtgctgctgttcaacggcgtgatcatcggttcggtggcgggccacctgcagcacatcggccatggtgatccgttctggcgcttcgtcgcaggccatggtgccttcgagctgaccgcgatcgtgatcgccggcggtgccggtctgcagctgggcatgaaactgctggcacccggccggcgcagccgcctggatgcactggtcgagggcggccgcatcggtgcgcgcctgtgcctgggcgtggcgttcatgctgctggtggccgcgttcatcgaagccttctggtcgtcgattgccgacgtgccggcgtggggcaagttcagcgtggccggcatgctgtgggccggcgtgctgctgtggctgtggcgcggcggacgcggaggcggccatgcgcattgaccacctggacgtggtgctgcgcgcgcgcagcggctgggaagcaatggagctgggcagtgccctgtcgcgccgccacgcacgcgcggtatggggcagctggctgctggccagtgcgccgctgttcgtggtcttcaacgcgctgggctggtggctggatgcattcggctgggcgtggctggcgatgtggtggtgcaagccgctgttcgaacgggcgccgctgtacgtgctgtcgcgtggcatcttcggcgagccggtcggtacgctggcggccctgcgcgcgcaacgcagctggggcaatgcaggtttctggggctacctgggctggcgccgtttcagcgtgctgcgcagcctgtgcctgccggtgaacctgctggagggcaatgcgccggcccagcgcggtgcacgccgccgtgccgtggccgctggtgcggcgggtgccgccgccgtgctgaccgtggcctgcatggcgtttgaagcggtgctggtgtccggtgcgatcggcgcggtgttcatgttcatgccgctggagctgatgtccgaatcatggcgtgccgcgtgggacatgatcggccaggacacacccgcctgggcgcgggccggcttcaacctggcgtgctggctggcctcggtgctgatcggtccgttctacgtcggcgccggcttcggcctgtacttgaaccggcgcacgcagatggaagcgtgggacgttgagatcgccctgcgccgcctgcgcgagcggctgctgccggcggcatccacgctggccctgctgctgtgccttgccctgccgctggcctccgcgccagtgcatgcgcaggacgcgcagacggccgcagaacaggccgacgatgccggagaggacgaggacagcgcggaggaaccggccactgcggcgaacgatccggccaatgcaccggccatgatcttcggtgcagcgccagtggacaccgccggcttccgccaggcggttaaccgcgcctatgaggacccgctgcagcgcccgacccgcgagatcacccgctggaagccgatcgagcaggccgaggaaaaaaagaaggaagacaagcagctgcagcgtgacaccaacagcaagggtgaacgcaaagcgcgcaaggacggcatcgcctggctggcacgcctggccgagtggggcctgtggggcctgctgggcgtcctgctgctggtgctgctgctgaccgcacggctgtggctgccgtggctgcgcggcagtggccggcgcaaggccgaggccgcaccgcaggtagtggaagaaccggtggaactgccggtcgtgctgccgccggacgtggccacccaggccggcctgctgtgggaccaggggcggccgcggcaggcgctggccctgctgtaccgcgccagcgtgcgcacggtgggcgagcgcagcggcatcgcgcttccgcccggtgccaccgaagcgcaatgcctgcgcgcgtcgcggcgcatgcccgatgccaccgaccgtgacctgttcgcgcgcatcgtgcgcatgtggcagtacgccgcctacggtggccgcctgcccagccgcgccgatttcgatgcattggccgataccctgcgccggcagtacaggtggctggcatgagtccgcgcctgttctggtcgctgctgctgggtgggctggtgctgttcggcgtgccgctgacgatcctctacctgcgcacgcacgaacgcgtgaccgagaccgtgcggctgccgccgcagggcgaagctggctacaacccgctgtacgtgctgggccaggccctgcgtgccgatggcatcgaggtgcactcgcggccgcggctggacctgcagcagatggcgctgggcccgcacgatacggtggtgctgctgcaggacagcagcgaactgccggcaccggcggccagggccctgctggcctgggttgatggtggtggccatctgctggtgcgtacgccgccgcccgccgaggacgacgccagcagcacgcaggggcccctgctggaccagctgggcgtggacagcctgtatcagcagagtgactgccagccattccacgtcatcgatgatcccagccacgtcgagttctgcggcggccgtcgcttcacgctgggctttgccgccaatgcgcgggccgaacggcgctggggcaacgagcgcaacctggtgttcgcgcgcctgcgccatggccagggcaaggtgagcgtgctggccgacatggagttcatgcgcggcgaggtggactcaccggcggcacgcctggcgtcggccgcaggcaaggccagtgatggcctgcacgatctctcgcaccgcgacctgacccgttacctgctcgacccgaattacggcaagggcactttctggctggtctacgccgcccgcccgccgtcgctgtgggcgcgcctgttctaccaggcctggccgctgtgggcgccgctgctgctggccctgctgggctggttgtgggcccgctcgcagcgctttggcagcctgctgccgtcgccggtgctggaacgccgctcgctgctggagcacgtgcgtgccagtggcgagctgctgctgcgcttcggccacggcacgcgcctgtacgacgccgtgttcgccctgttcctgcatcgcctgcgcctgcgcgcaccggtagccgctgcactggacggtgcgccgcgcgatcaggccatcgccgaactgctgaaatggccgcaaggccgtgttgccagcgcgctcacgcccccgccaccgcacgattcctccgccctgcgcgagcgcatccgcttgctgctccagatgagatccctgctatgaccgaagtccccgagctgccggcggccgccaacgcccgcctgatcgaacgcgtcgatgccatccgcaccgccgttggacacgccttcatcggccaggccgatgtactggaccagatcctggtggcgctgctggccggtggccacgtgctgatcgaaggcgtgcccggtctgggcaagaccctgctggtgcgtgcactggcacaggccctggagctggactacgggcgcgtgcagttcacccccgacctgatgcccagcgacgtcagtggccacgcggtgtacgacccgaagagcgagagcttcaagatccgtcgcggcccggtgttcaccaacctgctgctggccgacgagatcaaccgtgccccggccaagacccagtcggccctgctggaagtgatgcaggaaggccaggtgaccatcgaaggcaaggccttcaccctggcgccgccgttcatggcgctggccacgcagaatccgctggaacaggaaggcacctacccgttgccggaagcacagctggaccgcttcctgctgaaggtgctgatcgactacccgcagctggaggacgagaagcgcatggtgaccgcgatcaccagtggccgtgccgccagcgatttcgacctgagccaggtgccgcgtgtattgggggccggcgagctgctggaactgcagcgcgcgaccgcggcgatcaccgtcgatgacgaagtgatcgactacgcggtgcggattgtggcggccacgaggcagtggccgggcatcgcggtcggcgctggcccgcgcggcagcatcgcgctggtgcgtgcctcgcgcgcgcaggcggtgctggccggccgtgacttcgtcacgccggacgacgtgcgcgacattgcgcgcccggcgctgcgccaccgcattgcactggccccggagctgcagatcgaaggccaggacgccgacgacgtgctgggcgcgctgctggccaaggtggaagcaccgcgccgatgagaccggccccgctgctgctggcgctgctgctggcctgggctgccctgggcggcctggtgctgggcgggtggctgccgcgctggagctgggcgctggcagccgtcgtcatcgcgctgcccgccttgtgggatctgtggcggcagtcgcggcgtccgtcgccgcaggtacagcgcgagctgcccgaagcgctggcgctgggcgtgcgccgcgaggcggcgctgcgcctgcaggccgagcaatcgatgacggtgcaggtgttcgacctggtgcccggcggctggccgctggaagcgctgccgcagcgcgtgcgcctgcaggccggtacggcgtccaccctgcactaccacctgcagccgctgcagcgtgggcacttccgcttcgagggggtgcacctgcgcatgcgttcgccgtggcgcctgtggtggcagcaacgcacgctgccgccggcgctggaggtgcgggtctatccgaacttcgtgccgctcacccgcttcgcattgttcagtgccgaccaggcctcgcggctggttggtgcgcacgtgaagcgccgccgtggcgaaggcaccgatttccaccagatgcgcgagtaccgcatcggcgacagcctgcgccagctcgactggaaggccaccgcgcgtgcgcgcaagctgatctcgcgcgaataccaggacgagaagaaccagcagctgctgctgatgctggacagtggccggcgcatgctggccagcgaaggcgggctctcgcacttcgaccatgccttgaacgcctcgctggtggtggcttacctggcgctgcgccagggcgacgctgccggcctgtacgctgccggtggcgaacgccgctgggtggcaccgcagcgcggcatgggtacggtcgagcacctgctgcgcgccagctacgacctgcagccacgcgcggtggccaccgattacctggccgccgccaccgaggtgtcgctgcgccagcgccggcgtgcgctggtgatgctggtcagcaacgtgcgtgatgaggacatcgaagacctgctggcggcagtgcgcctgctgcagcggcgccacctggtgtgcgtggccagcctgcgcgaacgcgagctggacggcgcactggagggcgaggtgcagacactggaagacgccacccaggccggtgccgccgcgctgtacctgcagcaacgcgcgaaggcgcatgaggccctgcgcagcgaaaaggtgatggtgctggacgtgaccgccgatgccctgcccggcgcgctggtggaacgctatctggcggtgaagcgcgaagggctgctctgatacccgcgatcgctctggtaggcgccaaccttggttggcacgaacccacagcgccgaccagggtcggcatctaccaaaaccggttgccggccagcggccggcactaccccctgcaacaaccgccgcatcgccctggtaggtgccaaccttggttggcccgaaacccacagcgccgaccaaggtcggcatctaccaaaaccggttgccggccagcggccggcactaccccctgcaacaaccgatgcatcgccctggtaggtgccaaccttggttggcacgaaatccacagcgccgaccaaggtcggcatctaccaaaaccggttaccggccagcggccggcgctaccccctgcaacaaccgccgcatcgccttggtaggtgccaaccttggttggcacgaacccacagcgccgaccgaggtcggcatctaccaaaaccggttgccggccagcggccggcactaccccctgcaacaaccgccgcatcgccttggtaggtgccaaccttggttggcccgaaacccacagcgccgaccaaggtcggcatctaccaaaaccggttgccggccagcggccggcactacccctgcaacaaccgatgcatcgccctggtaggtgccaaccttggttggcacgaaatccacagcgtcgaccaaggtcgacatctaccaaaaccggttgccggccagcggccggcgctaccccctgcaacaaccgatgcatcgccctggtaggtgccaaccttggttggcacgaaatccacagcaccgaccaaggtcggcatctaccaaaaccggttgccggccagcggccggcgctaccccctgcaacaaccgatgcatcgccctggtaggtgccaaccttggttggcacgaaatccacagcaccgaccaaggtcggcatctaccaaaaccggttgccggccagcggccggcactaccccctgcaacaaccgccgcatcgccttggtaggtgccaaccttggttggcccgaaacccacagcgccgaccaaggtcggcatctaccaaaaccggttgccggccagcggccggcgctacccctgcaacaaccgccgcatcgccttggtaggtgccaaccttggttggcacgaacccacagcgccgaccgaggtcggcatctaccaaaaccggttgccggccagcggccggcgctaccccctgcaacaaccgccgcatcgccttggtaggtgccaaccttggttggcccgcccacagcgccgaccaaggtcggcatctaccaacggcggttaccggccagcggccggcactaccccctgcaacaaccgccgcatcgccctggtaggtgccaaccttggttggcccgaaacccacagcgccgaccagggtcggcatctaccaaaaccggttgccggccagcggccggcactacccctgcaacaaccgccgctgcaaccgctccaccgcacgctgcagcagcacccggttgcggcccagcttcatccactgcggcaggcgcgagaacatcgaaccgttggtaacgcccgcgcgctcccgcagaggcgcggcagcgtagtcgtgcagtgcctgcagatgggcttcgttgtaggcccacagcacgccggccgcagtcttttcgaccagccgcagcggcaagccaaaatgcggatcgatcgcctcattgccacgccatcgcgacaacgtgacctccacctcgctgctgcgtccgcactgactgcagtccgccgccagcgtccgcaacggcgacactgcacgcgcacggtgcagctcggcgcggacccatttgtgcccgcagtatccgcagggacgatagccgctgtagcacacgggcccgacccagtcgcccgcggcacagcaaccgcagccgcatccactgtcgagggctgcgctgcagcccaggcagcggaaacgtcgcgattccggcgtccgcaccacccagccgggcgtatcgcagcggtggcagcgcaccgcgatgcggtccgaatagcgccacagggcgtggccgtcatccagatgccggcccggcagcggcgcaggccgcaggtcgcgattgcgccgcaccgtcatcagacgtagatccgcgtcggcgcctcgtcgacgatcgcgtgcggcacgaagcgcgcactgtcgcgggtgatcgcgctgtcatcctcgcggatgccgatgccgcaggcatggtcaccgatcacccaactgccgatcagcggatagccgccttcgaagcgggtgagcggatgcgcacgctggatgatcgccgggccgtcgtagggaccgtcactgcgctgggtgctgccatcggccaggtgcatctcgatgttggccccttcgcgcgagaacagcggtttgcgcacccagcccgacgccagcgcgctgccgtcatcgaaatgcgcctccagcaggttcggatggcccacgttgcgctgccatagcagcggcaggatgcccttgttgctcagcaccgccttccaggccggttccagcagctgcacgcccgagccgggcagcgcgcggccgaattcctcggccatcaggtcttccagcggatacagcttgaacagcgtgccgatcaccgagtcgtccagcgcggtgaagcggccgtcctcggacaggccaatgtcctcgatggcgatggcctgcccgaacaggccggcctgggatgcgcagtcacgcaggtactcgaccgtgccacggtcttcctccgaagtgccgaccgcgctgaagtacagcggcggcggcagctgcgtggcgaggtcgccgaaacgctcgaccagcgcttcgtggatcgcgttgaactggtcggcatgctgcggcaggcggccggcattgcgctggtcttccagccactgccactggaagaagctggcttcgaacagcgaggtcggcgtgtcgtagttcaattcgtacagcttggccgggccggtaccgtcgtaggccaggtccaggcggccatagaggtgcggctggcgctggcgccagctgtcggcgatccagtcgcggtagtgcgacggaatcgccagctggtccatcaagcgttcgctgccgatgacatcaccgaccagatccagcgccatctggtgcagctcggcgctggggtcttcgatgtcctgttcgatctggcgcagggtgaaggcgtaatacgcgcgttcatcccagtacggctggccgtcgatggtgtggaagcggaaacccgcctcttccgcgcgcgcccgccactgggcacgctcggcaatccggatgcgctgcatgggttgatcagccgccgtagctgccgctggtgctgcggcgtgcgctggtgttgccgaagccaccacggctggcagtgaccgcacggttcggctcgctggtgaccggcgccaggccggccttgccagcaccgatgccgctggcggtgttcaggccaccggtgccgcccggtgccgggcgcgcccaacccgcattcttgtcctggtaagccggtgccgacgccggcgcctgcggggcgaggccgccgcggttactcagcatctgcgacatgaagaagcccatcatcatcgggccgatgaacgaggtaccggccgaggtgtgctgctgcacgcactgttccggcttgtagtccttctcgcaggcttccttgctggcgtacttcggcgccgcatcggcggcctgcttctgcgcttcagcgaacgcattgcggcacgacgacggatcgccggtggcctcggtgcaggcctccaccgaggtatacaggccttcctgcaccttcacctccggctccttctggcaggcggtgaacagcagcggcgcggcgctcatcagcagcagcgcggtggtgcgggaacgtttcatggcctcatgccctgtcgacggatcaatgccccaatgatgccaaatccgggccagcaaccggaatcggcaaagtgcgaaagatgaacggactttcattttcgtcggcattggggtcagagcccatcgcgccgcgatgggatccgaccccaggcgacgcaccgctctggtaggtgccaaccttggttggcacacatcccgcggcgcccggtcatgcccggcgcgcgcagccaagtctccggcaagaagcccccttgttgttcaagggggcgcgccgaaggcgcggggataaggggaaatgcgcggaccgccaagccgctgcaagcggtgaaggtggttgcagcagcaaccgaaaaaattggccatgatcggctgacccccacgtcgtacggcccgcccgttccgcccgccatgcccgaataccgttcccgcacctccaccgccggtcgcaacatggccggcgcccgcgccctgtggcgcgccaccggcatgaaggacggcgacttccacaagccgatcatcgccatcgccaactccttcacccagttcgtgcccggccacgtgcacctgaaggatctcggccagctggtcgcgcgcgagatcgaacaggtcggcggcgtcgccaaggaattcaacaccatcgccgtggacgacggcatcgcgatgggccacgacggcatgctgtattcgctgcccagccgcgagatcatcgccgacgccgtggagtacatggtcaacgcgcactgcgccgacgcgctggtgtgcatcagcaactgcgacaagatcacccccggcatgctgacggccgcgctgcgcctgaacatcccggtggtgttcgtctccggcgggccgatggaagcgggcaagaccaggctgtccgagcacaagctggatctggtcgatgcgatggtggtggccgccgatgacagcgcctccgacgagaaagtcgccgcgttcgagcgcagcgcctgccccacctgcgggtcctgctcgggcatgttcaccgccaactcgatgaactgcctgaccgaggcgctgggcctgtcgctgcccggcaacggcaccacgctggccacccacgccgaccgtgaggcgctgttccgccgcgccggccgcctgatcgtcgaactctgccatcgctggtatggcggcgaagaccccagcgcactgccgcgcggcatcgccacccaggccgcgttcgccaatgcgatgaccctggacatcgccatgggcggctccaccaataccatcctgcatctgctggccgccgcacaggaggcggaggtcgacttcgacctgacccacatcgacgcgctgtcgcggcgcgtgccgcagctgtgcaaggtggcgccgaacacgccgaagtaccacatcgaggatgtgcaccgcgccggcggcgtgttcggcatcctcggtgagctggaccgcgccggcctgctcgataccacggtgccgaccgtgcacagcgccagcctggccgacgcgctggaacgctgggacgtggtgcgcagtgacaacgacaccctgcatgccttcttcaaggccggcccggccggcatccccacccaggaggccttcagccaggccacgcgctggccgaccctggacatggaccgcgccgagggctgcatccgctcgctgcagcatgcgtactcactggaaggcggcctcgccgtgctgcgtggcaatctggccgtggatggctgcgtggtgaaaaccgccggcgtggacgaatcgatccacgtgttcgaaggccccgcgcgtgtctatgaaagccaggacgcggccgtcgccggcatcctcgccgacgaggtgcaaccgggtgaggtagtggtgatccgctacgaagggccgaagggcggccccggcatgcaggaaatgctctacccgaccagctacctgaagtcgaagggactgggcaagcagtgcgcgctgctcactgatggccgcttctccggcggcacctcgggcctgtcgatcggccacgtctcgccggaagccgccagcggcggcacgatcggtctggtggagaacggcgaccgcatccgcatcgacatccccgcccgccgcatcgacctgctgctggatgaggccacgctggcccagcgccgcgccgacgccgacgcacgtggctggaaaccgcgcgcgccacgcccgcgcaaggtcaccagcgcgttgaaggcctacgccctgctggccaccagcgccgacaagggcgccgtacgcaacaccgccctgctcggcgattgatgccgatccggtagtgccggccgctggccgccatctgggaaaaggggacggaggggattaagtcgtttgtgcctcaaacgacttaatcccctccgtccccttttttcagccgatcacgcgcttgaacggcggcagcgcgtcgatgatgcgcttgccgtagcggcgggtcagcagccgcgaatcaagaatgaccacgcggccggtgtcggtggaggtgcggatcaggcggccggcgaactgggtcagcgtgcgcagcgcatgcggaatggcgatcaggttgaacgcgttgagcccgcgtccctcgaaccactcgctgagggtggcggtctgtgggtcggtcggcacggcgaacggcacctgggtgatcaccaccgtggtgcaggcctcgccgggcaggtcgaggccctcgccgaacgagttcaggccgaacagcaccgagccctcgcctgcctcgacacgcctcaggtgttcctcgatcagccgggtcttggacatctcgccctgcaccagcacctgcttgcggcgcgcggccggcatcagcccggccaccttctccatcttccagcgcgaggtgaacagcaccatcgagcccttggcccagtccagttcggtgtccaggtagcgcgccacttcgcgcgggtggccttcgcggtcgtccggcgtgaccgggaacttcggcacgatcagttcggcctggttgggcaggtcgaacggcgacgacagcgagaccatctcggcctcttccggaatgccgttgtcgatcgccagcgactggaagtcgccaccgccggtcagcgtcgccgaggtcatcaccaccgagtccacttcatcccacagcagcttgcgcagcacgtgcgcggccgacaccggcgaaccgtgcagcaccaggtcgccatcgcgggtggcagtcacccagcgcgccatcggcggcgcgccgtccttgtcttcgcggcgccacgcctgccacaggttgtactgctgctcgatcatctccagcgccatgcccaggttgcgctgcaggcgctcgcgcgcggcatcgtccggcttgcccttggccacctgcgtggtggccgcatgggcccagttgtagaggctgcgggtatcgtcggccagtgcctcgatcggctcgcgccaggcctcgggcaggcgtccattggccgcgcgccacatcggctcttcgtccgccggcgccggcatccacacccgctcgatgtgatcacggaacgcgcgcagctgcttggccacgttgctggcgacttcgatcgcttcgttgggcagcaggttgcccagccggtccttgtcgaccgcgcggtacgcaccggcgatcaggatctgcaggcggccggtgcgcttggccatctcgtccagcgcgaggctggccgcgccctggtcgatcgccacgttgccgatgtgatggccttcgtccagcaccagcagcatgtccgagggcggcgcgatcaacggctggccgttgtcgctgtcaccgatcgacagcgccgacagcagcagcgcgtggttggtgaccacgatctgtgcgtcgcgcaccgtattgcgcgagcgcagcaccgcgcactgcgccgaataggcgcagcgtcgcccggcacaacccgaggccggcgtggtgatgcggctgcgcaggccgggactgatggtctccggcgcattgtcgatatcgccatcccagctgccgctggtgaaggcgtcggtcaggcgtttggcgatgtccatctcgatcggcgccagcggccggtcgaacagtggcgcgtcatcctcgaacatgccgccctgcgagccctcgccctgcgcctcggcggcattgcgcgtgcacaggtagcgggtgcgtcccttggccagcgccacggtcgcttccaggccggtggccttcaggaaattcgggatatcgcgctcgaccagctgcgactgcagcgccacggtgccggtgctgatcaccagcttcttcttggtggccagcgcgatcggcacgcctgcggtgaggtagcccaggctcttgccgacgccggtcggcgcctcgaccacgccaacgccaccgcttttcgacagcgcgcgcgacaccacgccgatcatctggctctgcgagcgacgggtggagaagccgggggtattggcctgcagcgtcgtgtacgccttgcggatcgcgtccttcaaggtgtcatcgagcgtgcgcggagcggcgacggtttcggtcacgccgggaactaccgtagctggatcaggccggtcattgtcgcatggccggccgcgttcactgttgctggcaccctgaacgagccagcgacgacgcccgccggcgcgcacggtccgaagcccgcgccgcacaggggcgaaacacgccgggcgtggcccggcgccagcgctcaggcgaccggggcgggacggctacgcagcaggcgcaccagcgcccacaccagcagcaccacgccgatggcctcgaccatcgccagcgcgaagtgcaccacgccgaagatggcgctcatgcccgagatggcgctgaagttgccgctgctgaccagccacatcggcagcatgcccgccgccaggccacccaggctggacagcagcaacagcagcaggccgaccagcgcgccggtgcgggtggcatcgcgcggcgcaccgaccacccagaccaggccgacgcacagcgcgatcagcaccggcaagcgcacgccgaccatgctcagcacggtcaccatcagggttgtgctgtccatcggtcagtcctcgccggccagcacggccgagccctggcgcagcgactggtagacctcgccggtctgcgggcgcacgccgtgccactgcaggaagctctcggcggcctgctcgaccagcatgcccaggccgtcgacggtattgcggcactgcgccgcacgggcccaggccaggaaggcgatggccgcctcgccgtagttcaggtcgacggcagtggtcatcgaattgaccagcgacagcggcagcttgaactcgacgtcgcggtcgcggccagccgaggtggcattgacgatcagttcgaagtcgccgaggtcgcgcaggtcttcccagtagcggctgatcgcacggccgggctcgcccatcgcgtcgatcagttcgtcggcgcgctccggcgtgcggttgaccaccaccagttcggtgatgccggcatcgagcagcgccggggcgacgctgcgcgccgagccaccggcgccgatcatcagcacgcggcggccgcgcaggtccaggccgtggcggtcggtcaggtcgcgcaccaggccgatgccatcggtggtgtcgccgtgccagcggtcgcccttgcgcagcagtgtgttgaccgagccggcgcggcgcgcgcgcgcggtcagcgtggtgcacaccgagaacgcggcttccttgtgcggcagggtgacgttggcgccgacaccgtcctcggcggcgaaggcctccagtccggccaggaacgcatccggggccaggtcgatcgcgcggtagtcgatggcgatgccttcctggcgaccgaacgtcgcgtggatctgcggcgacttcgagtgggcaacggggtgtccgaagacggcgtaacggtcggtcatggaatcctcaagctggctagactgatgctctttcgtgcacggaaccggatgatgcgcatcaccccgcccctgctggtgctcgccgccagtctactctctgcccccgtggcgatggcgttgaacgagtacggcatcgaaggcatgggcgtggtctcgacccgcgccgacgaaggtcgcgccacgatcagcgccgatggccagcgcatcgtcttcgcccgccgcggcgaggccggctggggcctgtgggaggcgcgcgtggtggacggtcgctggcagcaggcacaggtactgccggtaggcgtggccggtgaagcccgcgatccctacttcagccgtgacggccgctggctgctgttcgcggccggccgcgagggcgcgctggcgctgtaccgcgccgcgttggccgccgacggccggctgggcccggcgcagccgctggccggtgacggcgggcgccgggaagagcgcgggccggccctgagcgcggacggcaagcagctgttgtttgcccgccagcagggccgtggcgccggctgggacctgttcgtggcgacgctggatgcgcagggcctgcgcggcccggccagcgcactgagcgcgttgaacagcgccgacgacgagaccgacggcgactggctgggccaggacggcgccgtggtgttcagccgcggcaacggcagtaccgcgcaggtctggagcagcggctgtgcgtggagcggtgtagcgctgcagccgctggggctgtcgttcaaccaggccggcggctggaccggtgcgccggtggtcgacaacgccaagccgggcgagatgatggtggccagcagtgcagcgaaggcgccgcgtgccggtggcgtggacgtgtaccggttggcggtgccgaaggtggcggcggtggccgggtgcgcgcggtagatccacgccatgcgtggatggccgtttggtagatgccaaccttggttggcatacgtgaaagcgccaaccaaggttggcgactaccagtagatccacgccacgcgtggatgaaacgccccgtcagcgcgacaacaccttggcgcgcaactgctcgtactccatctcgctcagctggccgttgtccttgcgctggttcaacgcggccagctcggcctgcacggtctccggcagcgcctgctcacgggccacgtggcgggcagcggagagctgttccggcgggcgcttgccggcccgccaggcggcgatgaagacagcgacgatgatggcgccgaacaccagcgtaccggtgccccagatcagccattgcacccatcccagttcgggtcccatcgcgcagtcctccgtctatcgtggcgctattgtcagcgctcgcgcagccatcgcgccacctgcggcgcgaaataggtcagcacgccatcggcaccggcccgcttgaagcccagcagcgactccagcacgcaggcgcgctcgtccagccagccattggcgaaggcggccttcatcatcgcgtactcgccactcacctgataggcgaaggtcggcacgccgaatgtctccttcacccggcgcaccaggtccaggtacggcatgcccggcttgaccatcaccatgtcggcgccctcttccaggtccagcgcgatctcgcgcagggcctcgtcgccgttggccgggtccatctggtaggtcttcttgtcggccttgccgaggctggccgcgctgcccaccgcatcacggaacgggccgtagaacgccgaggcgtacttggccgagtaggccatgatgcgcacgttgatgtggttgtcggcatccagcgcacggcggatcgcgccgatgcggccgtccatcatgtccgacggcgagacgatgtccacaccggcctcggcgtgcgacagcgactgcttgaccagcgcttcgacagtgatgtcgttgagcacgtaacccttgtcgtcgatgatgccgtcctggccgtgggtggtgtacgggtccagcgccacgtcggtcatcactcccagttccgggaagcgcgacttcagcgcgcggatcgcacgctgcgccaggccgtcctcggcccacgccgccgacgcgtccagcgacttcagcgacgggtcgatcaccgggaacaggtcgatcactggaatgcccagttccagcgcttcttcggccaccttcagcagctcttcgatcgacagccgctccacgcccggcatcgacggcactgcggtgcggcccgcacgttcgtgcacgaacaccgggtagatcaggtcgtcggtggtcagcgtgttctcgcgcatcaggcggcgcgagaactcgtcgtggcgcatgcggcgcgggcggtaaagcgggtgggacatggcaggctccgaggagtggctattgcaacaggtagccctgcggcagcaggggttcgggcaacgggcgttcgccgagcgcgtcgagctggtcgatctcgatcgtgcgcaccagcgcgtccagcggcaggtcgttcggctccaggccgaacgggtcttccatttcttcgcccagctggtccaggccgaagaaggcgtaggccagcaccgccgacagcaccggcgtgccccagcccagcgagctggccaggccgaacggcagcagcacgcagaacatccatgcgcagcgatgcagcagcagggtgtaggcgaacggcagcggcgtggtgaggatgcgctcgcagccggcctggatcgacgacatcgcgtgcaggcgctcttccagctgggtgtagaggatcgggtcgagttcgccggcgcgcagggcctgggccagctcggcagcgatcatcgacagcaatgcgtcgggcacgttctcgcgctggcccagctgctcgcgctgcggcttgtccagccacggcaacgccgccagggccacgatgcgcccgcgcaggcgcgcggccagcgcatgggcaaaagccgtagtgaggtaggcgatgcggcggcggcgaccggcgtcatcggccagcagcaggttcacctggcgggccagcgaacgcgattcgtagaccagctggccccacagcttgcggccttcccaccagcggtcgtagcaggcgctgttgcggaaactgaggaagatcgacagcaccaggccgagcagggtgaacggcgtgacggaaacgcgctcgatgccggtcggcggcgccagctccaccaccgcggccaccgcgatggacaggatcaggatggccagcaccttcggcgcgatcgcttttacgatcgagccgcgcaggatgtacagcagttgccagccgtggggacggggtcggatgatcatggggcagccgcgccgggcgcggattcacaggcacgcggggggctcgcgcagccattcattgtacgcccctgcccggcccgcggccgtgtacctgcgacgccctgtcgcacccggcgatgcggctcagatcacgccgccccccaggcccaggcgcaggatgccgaccaccaccacgatgccgttcagcaccagcccggcccaggcccggccgcgcttggtcgggtgggtgaacaggatgcccagcgcggcgatcaccgcgcccacggcggcgaacgggatcaggaaccagttgccccagcccagcagcggaatcagcgccaggatcatccacaacagcgccagtacgccccacaacagactgatcacgcccattccactctcccgcagttggttcctgtctgtgcaccatagtcgttcccgccgtcgccgcctactgccgttggcggggctgtcaccggcaccgtgctagcgtgccgccgtgcctgctctgggccgggtgttggcgccgattcagagtagcccgccgatgatcgcaaccagtcctacaggggtcgtgccatgaacatccgttgggccgcgttggcggccatcctgctggtcgccgccggctgtgccagcacctccaaggtcatgctggggcgcgcccgcgcgccgatcgatccggcactggtgcagatctattcgacgccgccggccggctcccaggaaatcgcccagctggaatcggcgtctgccgtgggcttcggcacgcagggccagaccgatgcagcggtggcgcgcctgaagcgcgaggccgcagcgctgggcgccaatggcgtggtgctgatgggcgtgggcagcagcggctcaccggtgggcatgtcggtgggtgccggcacgttcggctcgcatgtcggcggtggcgtcggcatcggtattccgaccacgcagaagcgcgccgccggcgtggcgatctgggtgccgaacccggaacccccggcacgactgccgacgcaggtgatcaccccgcagcggtgacgcggcagcatcaccgcgggtagtgccggccgctggccggcaacctcagaaatcctcccgacgtcaggggaatgccggccagcggccggcactaccggggggtgttcagcgcttgtacttcggcacgaacaccttgttcaccgcgtcggccagctggtccggcggcagcaggccctggtcgagcaggaagttgttgaacgccaggcggtcgaacttcgcacccagtgccagctcggtctgcatgcgcagttccaggatacgggtgtagccgtagaagtagctgccggcctggcccggcatgcgcaccatgtagcggtccagttcctgggtggccatcgccttggacaggccgacctgctccatcagcacgcgctcgccgttggcgcggtcggtcaggccgaggttgagcatcgggtcgagcatcgcgcgtgcggcgcgcagcaggcggaactgcagggcgatcatctgcccgtccagcggctcgtacggcaccatctcggcctcggcatacagcgcccagccttccacgttcaccgaattgaacgcgaacatggtgcgtgccagcgacacgccgcgctcgaccatcgcggtgaactgcagctcgtggccggggcggccttcatgcgcgctcagcgtccacgccgccgcaccgaagttgaagtcgtcgtactgtgcgcccgggcccgcggccgggttgcccagcggcagcacgaaggtgccctgctgcccggtgttgttgaccagcggcgccggcaggaaatgcggggccgggctggccgcgctctcggcggccgaacccaggcgcatctgcatggcgcgcttgggcacgtcgacgatggcgtgctcgcggatcagcggatcgatcgcatcgatcaccttgcggtagtggccttccagatggtcgtcggcgatcttgtcggccttcagcgcgcggatcaccgccaccgggtcgcttgggtcggccaccttcaggcccttctccttcaccaccagcggcgccagctgctgcatcgccgagcgggtttccatgaactccagctgcgcacgctgcatcagcagcttcgggtcgatgtcgatgccgacctgcttgagctggtaggcgtacagcggcgccggcagccgtgcgtcggtgcgcgccttcggcagcacggtcgagcgcgtccagctggcgtagtccttcatctgcccggccagggccttcatcgcttcatcggcgccggcgatctggtacttcttcagcagcgactcgatgccgctgatgtaggtctcgacgttgtccagcgactgctgcacttcgatcttcgtcggctgcaacaggctgctgtccttcaagcgctcttcgtagcgctggcgggccagcgtggtgaacgcggtgccgcccggctgcaggccggcgtaagccttgaggcggtcgatcgccttggcccggcgctcggccggcacctggtcggacagcagcaggttaaggccgctgaacaccgtctgcggcgcgtcactccacggcagcaggtacttctcgttgagctcactgccttcgatgttctggttggcggcgtggatcatgatctccaggtcctggcggacgttgggatcctgctcggtgggcagcttcgccttcagttcgtcgcgggccttggccatcgcggcgcggtagcgcttgccgttgtccgcgccgaggtcggccaccttgtcgtcgtagccgggcacgccgaagaagccggtttcttccggctggaacgggccctgcgcatcgagcaggatctgcgccagtgcgttgctgcgggccacccaggccgggctggccggtgtggcggccttggcggcgggtgccgccagcgccggcggtgcggacagcagcggggcggcggtcagggccagggcaacggccaacgcgatcggcttcatggtgcactccaggacagggttgcccgcaccctacgcgctcagcgcggtggcgacaatcggccggaggtcacaacgctgcggtcagcgggcattcgccgcgttcgcggcaggcctgcagttcgcattcctgcgcggcctcatcgtcatccagcgcagtcaggtcgaaggtctgcttgttctcgcccagcacgtacatcaccgggtagtcccacacgtcgtcactgcgggtgcccttcacgaacaaccggccgtgtgcgcgggggccttccagggccacggtcaggccgacatcgcgctggccgttgagcgcggtctgcatgctgcccagcggcatcgattcggtacgcagcggctcgccgaaggcttccaccagttcgatgctgcagccggcgcgacgcatcgcctcgcgcatcggtgggctctcgcgtgccgcctcactccagcgcagcacgctccaggccaccgtgccaccggccccggccagcaccagcagcacggccacgggcatcgcccagcgccagtggcgggaccaccagccggcgggcttcgggccgtgggtgggaatcggcggcggcagtgtcatcggcgggctccttcccgtctgtgtttcaaggcttcaggcagcgccccaggaaggcttcggccacacggtagcgatgcagggcatcggcgccggacaggccatgcttggcacccgggtaggtcatcagctcgaacggctggccgcgcttctgcagcgcgctcatcaagctggtcgaattggtgaacagcacgttgtcgtccgccatgccgtggatcagcagcaacggcgagcgcagcccatcgatgtgggtcagcacgcgcgcttcacggtaaccggcgtcgttgcgcgccggcaggtccatgtagcgctcggtgtaatggctgtcgtacaggccccagtcggtgaccggggcaccggccacgccgcaggcgtactggttcgacgccttggccagcagcatcagggtcatgtaaccgccgttggaccagccctgcacgccgatgcgcgccgggtccacccacggctgctgcttgagccaggccacgccgcgcagctggtcggtcacttccaccgtgccctgcttcccatacagcgcaccaccgaagtcgcggccacggcgcggggtgccgcggttgtccagcgagaacacgacgtagccctgctgggccaggtactggttgaacagatggtcgccacggccgggccagctgtcggtgacggtctggctggccgggccgccatagacatacaccgccaccgggtagcgcctggacggatcgaagccggccggcttgatcaggctgtagtgcagtggcgtcttgccgtcggcggcggtgagcgtgccgaactcgaccgggcgctgcgcgtcgcggtagcgcgcatacgggtgcttgggatcggccaggttgttttccaccagtgtggcgatcttctcgccgttggcgcggaacagctcgatctgcggcggcgtggtgctgttggaccagctgtccacatagacgctggcgttgcgggcgaagctggcgctgtgcatgcccggcgccttcgacaggcgctgcggctcgccgccctgcagcgataccgcgtagatctggctttcgcgcgggctttcgatgccggcgcggaagtaggccttgccggccgtctcatccaccgccagcagctcgtccaccggccagttgccgtgggtcagcgcggtggtcttgccgttgctgtcgatgcggtacaggtgctggaagccggtgcgctcggacgaccacagtacgctgccgtcttcaaggaagcgcaggctgttgtgcagcggcacccaggtcgggctggtttcgtgggcgagtacgcgctggcggttggagtcgagtgccacttccaccaggtccagctgcttctggtcgcgcgactggcgctggaagctcaggtgctgcgcatcgcgccaatcgacgcgggccaggtagatgtcctgttccttgcccaggtcgacccagcgcggctgcgccccggcggccggtgcgatcacgcccagctgcacgcgcacgttggcgtcaccggcggccgggtaacgctgttcgatcacatcggtgcggtcggcgtagacctcgtagcgcttctgcaccggcaccggtgcctcgtcgatgcgcgcgaacgcgatggccgaatcgtccggtgcccaccagtaaccggtgtggcggtccatctcttcatcggcgacgaactcggccacgccgttgccgatggtggtgctgccgtcgcgggtcagctgcagctgctttccactggccaggtcgatcacccacaggttgcggccgcggatgaagctgacgaagccgcccttgggcgacagcttggcgtcggtggcgaagccctcaccgtgggtcagctggcgcacggccgccgccccctgctgcttgaggtcgtacaggtacagctcgccgcccaacgggaacagcaggcgctgtgcgtccggcgaccactggtaatcgacgatgccggtcatcgcggcgatgcgctggcgctcgcggcgcgccttttcctcatcgctgagggtctcggtgccgggcagcaccaccttggaatcaaccagcaaccgggtctggccactgccgatgtcgtaggtccacagatccagctggttgcgatcgctgtccttgccgcgcaggaaactgacctgcgaaccgtccggcgccaccttgggcttcatcagggtcgggccggacagcggcagcgggccggtgatggcctccagggtcagcttttcggcgtgggcggcggtactggtggcgagcatgagggcaagcgaagcgaacaggtggcgcatggaggatcccggcaaacggcaggtccgcccggcggcgggcgcggggcggtcgttcccccatcctaaccaagcccgtgcaggaaggcagcatgaccttctgcccatgctgcggtgctggggtcagggccctttgcgttgcaaagggatccgaccccgcggcgggtcagcgctggccgaacaggtgcttgcgctcttcgtcgctgagcggcttgccggcgttcgggttcacctgctggcgcagcgcataggcgcgctgggtggccgggcgcgcggcgatggcctcgtgccagcgcttgaggttcgggaacgcggcgaagtccaccggcagcttgtcgtaggcgccgatccacgggtagctggccatgtcggcgatggtgtactcgtcgccggccaggaaggcgtgctgggccaggcgcttgtccatcaccccgtgcaggcggcgcacttcgttgtcgtagcgctcgatggcatagggaattttttctggtgcgtacacgttgaagtggcccatctggccactcatcgggcccaggccggccatctgccagaacagccattccaaggtggtcacgcggccgcgcgggtcgctgggcaggaagcggccggtcttctcggccaggtacagcaggatcgcaccggactcgaacacgctctgcggggcaccgccatcggccggggcgtggtcgacgatggccggcatcttgttgttgggcgagatggccaggaactctggcttgaactggtcacccgagccgatgttgaccgggtggatgcggtactccaggccggcttcctccaacagcagggtcactttgtggccgttcggggtgggccagtaatacaggtcgatcatggcgtcggctcggggtgcggaaaggaacctgaagtctagtgcgtgagttgggttggcaccgtcatggcgggccggtaacctcgcctctcccccgaaacgcagcatcccccgcatgagtgcaaaccgcccgccgctctccccgttgtccacgctgatcttcgcctcgcgctggctgcagctgccgctgtacctgggcctgatcgtggcgcagtgcgtctacgtgttcctgttcggcaaggaactgtggcacctgatctcgcattccgcctcgatgggcgagcagcagatcatgctgatcgtgctgggcctgatcgacgtggtgatgatctccaacctgctggtaatggtgatcgtcggcggctacgagaccttcgtctcgcgcctgcgcctggaaggccacccggaccagccggaatggctgagccacgtcaatgccagcgtgctgaaggtgaagctggcgatggcgatcatcggcatctcctcgatccacctgctgaagaccttcatcgccagcggtgcgctgggcggtatcccgctgtgcacgccggagcagatgagcgtggccgccgccaacatcggtgtcgcccgctgctcgatgctgacccaggaaggcgtgctgtggcagaccatcatccactgcgtgttcatcctgtcggcgatcggcatcgcctggaccgacaagctgatgtccaacggccacagcaagtcgcacgacaaggcacacgaccactgaggtcgccgccggccacgacatgatcgccgcggccccacccggccaccaccccttgtgcggggcggtggccgggatgctagattgcatcctcgccgttgccggcggtggcgtcgggaaacgccaccctgccgcgcctggaccacgggtcccggccatgcatatcaatgatttacgtcacgtcgtcttctaaaggggagcaggatgtcgcacgtctcaacgatcaccgccgcgcgccggtggctgccggttgccttggcactggcgctggccgcctgctcgggcaaggaagaatccgcagcaccggctccggccgccgcccccaccgccgctgcaccggccgcaccggtggtcgccgccaaggtgcagtcgatgggcaccgagcagctgcgtgagtcggccagccaggccctgcgcgagaaccgcatgtacgcgccggccggcgacaacgccatcgagtactacctcgccctgcgcgacaagaccccggacgacgcctcggtgaagagcgcgctgaccgacctgctgccgtacaccctgatcgccgccgagcagcacctggggcgcgaggactacaccgaagcgcagcggctggtggcgctgatcgagaaggtggatgcatccgcgccggccctgccgcgcctgaaggacggcctggccaagggcgtgcagaacgcggccaagcgcaccgaggccgaagccgagaaggccaagaaggacgccgaggaccgcagcaagcagcagaccgaacagcagcgcctggccgagcagcgtgccaaggaagccgacgcggccaagcagatcgctgcgcagcaggatgccgcccgccgcgacaacgagcgccaggaagccgagcgccaggccgccgcgcgccgcgaagccgagctgaagcagcagcaggccgccgcccagcaggccagtgccgcacgccaggccgcggctccagcggccgctgcggcgccgaacctgcgcccggtcagcaccccggcgccgcgctatccgtccgaggcactgcgtgcaggcacctccggcgaagtgctggtggaaatcaccgtcggcaccgacggctcagtgaccaacgcccgcgtgctgcgcgcaacaccgtcgcgcgtcttcgatcgcgaagccatgaacgcggtcaagcgctggcgcttcgagccggtcagcgcaccggtcaccacccgccgtaccctggtattcgccccgggcggcacctgaccgcaaaaaggggacggaggggattaagtcgtttccgcccccgcaatgaggacacggcccggcatgtccgggccgtgttcgtttcaggagaggctgtcgatcagccgttgcagtgccggatcgcgcgcggccagcacctggaacaggcccagcgcatgcaggcccggcagcagcccacgcaggtcggcttcggcggtggcgcgggtggcgtcatcgctggcggggtcctgccagtcacggacgctggcgaggaaggcgacgacgctgcccttgcgcacggtgaggccgtttacctgcacctcgtcctgatggtcgggaagaatgtcctgcggctgcatgggtgatgctcctgtgggatcgggagcccagtgtgacgcccagtcatcggcagttctgccgtataactgccattggatatggcagatcagacatcacctgtgctgattgaccccgctttggcgaacgctgaaggcggtcctctcgtcatggcctcccagctgcgggtgccgggacggcgccgcaccgcgcgccaccagcacgtgcgcggccagttgctgggtgcccaccacggcctgctgcggatcgaggccggcgacctgcactggctgctgccggcggggcatgttgcctggataccgcccttgctgccccacgccctggtaggggcagacgcattcgatggctggagcctgtacgtccgcgccgataccggcctggatctgcccctgctgccccgtattttccaacccgatgcgctgttgcaggcggcggtgacgcgcgcactgcgctggccacaccaggcactggacgctgcgcaggcacgcctggccgacgtcatcgccgatgagatccgtgccagcactcccttgccatttgccctgccacagccgcgggatcgccggttgcggcggatcgcggcggcgctggcgcgttcgccggacgacctgcgcagcgtcgaagcgtgggcagccgccagcggactgtccagccgcagcctcgcccgccgttggcaggccgaaacaggcatgaccttgagccagtggcggcagcgcctgcgcgtgctgctgtcactgccacgcctgctggcaggcgaaccggtgatcagcgtcgccctgtcgatgggctacgacacgcccagttccttcatcaacgtgttcaagcgcgagatgggggtaacgcccgcgcggtacgcaaaaggggacggaggggattaagtcgcttctgactcctccgatacgcctgcgcggcattacctgatgccctacgccacggtgccgatgccaggctgaggcccccttcgacctgggaatcccatgccccgacaagcgcgcctgatgctggccggccaggcctatcacgtgatccagcgcggtgtgaacaagggtgcgatctttgtcgacgacatcgaccggcaactgttcctgcatctgctgcacagcgctttcctcaagcaccgcgtcgcactgcatgcctacgtactgatggacaaccacatccacctgctggccacgccatccacgcagcgtgggctggccgatgcaatgcgcatgcagggcaacaactatgtgcaggctttcaaccagcggcacggccgcaccggtcccctgtggcagggccgcttccattcctcgatgatcgacagcgacgcttacctgctcagcgtataccgctacatcgaacgcaatcccgttcgtgccggcattgcggtcagtgctgaagatcatccgtggtccagcgtgcacggcaatcttcaacgacgcgatgaccccatgctgaccccgcatcccgcattcagagcgttggccgcgaccgctcgcaacaggacgacggtgtatgcgcgattcctgcgcgatgtgaatgcgtccgccgatctgcccgcaatccgcagtcatagcgccaaacagcgtccgttgggggatgctgcgttcctgcggatggtagagaagacgctcgggcgcccggtggcgatgcgaagacaaggccgcccgcgcaaggaggggacgggaggggcagaaacgacttaatcccctccgtcccctttttggggtcagccggagatggccaggcgctcgttgtggtagcggcgcacggcggcgaaccacagcacggcggccaggccgaggctggcgccgaggtagatcgcccagactgcgggggtgatggtctcgtggcggatcaccttcagcagcatctggttctgcgacaggaacggcacggcgtactgccacatctcgctcttcagcgggtaggccaccagtgcgtagccgggcagcatcggcagcagcatcagccaggtcatgtggctctgtgcttccttcatgctcttggccgcggccgacaggaaggtcagcagcgaggtaccgatcagcagcatcggcagcatcaccagcaacatctgcagcatcgagccgacgttcatgttgaactggcggccgatgttgccgggtgcgatctgcgcgctcaccttgaacgcgaccagggtcagcagcagcgacacgaaaccgaccacgcaggcggcggcgatcttgccgctgacgatcgcgctgcgcgagcccggcgtggccagcaggggttccagcgactgccgctcgcgctcgccggcggtggcgtccatcaccaggtaggcacccccgatgaacgaggtcagcgtcagcagtaccggcagcagcatcgacaggatcatgccgcgcttggcctcggcactggccaggtcctggcgcgccacgtccagcgggcgtgccacctgtgcatcgatgccgcgtgccatcaggcgcaaggcaccgacctggccgttgtaggtggccagcgccgcctccaggcgtgcactgggtacctcggccgcgcgacgcgtgctgtccttgatcacctccaccagcgccggcttgccctcggcccagtccttgccgaagtccccgctgatgcgcagcgccacatcgatatcctggctgcggatggcctcggccaggtccttcggcgccggtgcggcattgaggccctgtgcggcgaggaagcgcaccaggttcggcgcgttctccgcgccgatcgtcgggatctgcaacggctcctcgatctgggtgcgcacccggctctcggccagcttgcccatgcccagcagcagcaccgggtacagcagcggcccgaacagcagggtcagcagcagcgtgcggcggtcacgcgacaggtcgcgcagttccttgcgcatcaccgtcatcagggtcgacatcatgctcatgcgtgcaggccctcttcgctgccgatcagtttcacgaacgcgtcctcaaggttggcttcaccggcctgcgcacgcagatcatcggcgctgcccgcggccatcaccgtgcccttggcgatgatcacgatgtggtcacacaacgcgcccacctcctgcatgatgtggctggacaggatcacgcagcgaccctcttcgcgcaggcccagcaggaagcggcgcagcgcgcgcgtggtcatcacgtccaggccgttggtcggttcgtcgaggatgacgttgcgcggatcgtgcaccagcgcgcgggcaatcgcggtcttggtgcgctggccctgcgagaaaccatcggtctgccggtcgaggatgtcgcccatgtccagcgcgtgcgacagcacctcgatgcgttcgcggatgcgctcggccgacaggccatgcagctcggcgaagtaggcgatgttctcgcgcgcggtcagacgcttgtagacgccgcgcgcatcgggcagtacgcccaggtggcgacgtacctccaccggattgccggcggcatcgatgccatcgacgctgatgctgccctggtccggggtcatcagcgtgtagagcatgcgcatggtggtggtcttgccggcaccgttggggccgagcaggccggtgatctgcccatcgccggcgcggaagccgacgttggcgaccgcctggatgcggcccgtgcgggtatcgaaggccttgtgcaggttgtcggcgacgatcatggttcccatccgttgaacgaggtgaacgccggcacgtagctcagcgtgtccaggcagccggcatccagcgccttggcatcggtcttgtcgatgaactggccgagcagccgcggcatgcagccggcggtcaacgtgccatggccctggccacgggcgaccagcgcacggccattgggcaggcccttgagcacctgtgcggcgtagcgcgggggggtgaccgggtccagctcaccggacagcagcagtgccggcacgtcgctgcgcagcggcacggcatcggttgccggcgccggacggtgcggccacaccgggcaggcggcgaagaaggcgctggccacttcgttgccgaacagccgctcggggtcctcggccggcgcgtggtagcgcggcgcatcctcgctgcagatcaccgaccactgcatgccgcggttgatctggaaatccatgctgcggttcgcgccgcgcgccagcgatgccaacggggcataacgaccgtgcgcggcttcatccagcaccagtggcagcagcgaggaatactgcggcacgtaggagaaggcgaaggccaggccgaccacgctgtccggcgtcaggacatcctgccgcggtgcgttggtacccgggtcgcgatactcgaccgagaccggtgcacggcgcagggtgtcgaccacgctgcgcagctgcgcgcgggtgtcggtcgggaaacgcttgctgcacgcggcatccttgcggcactgcgccgactgcagggcgatcgcatcctcgaaggtggtcgcgaagtcgccaccgaccaccagctcgttcggtaccacgccatcgatgacgatgctgcgggtgtgctgcggataggccccggcatagcgctgggccacgcgggtaccgtaggagccgccaaccaggttcagctggtccacaccgagcgccgcacgcaccgcatccagatcggcgatcgcctcggtggtggtgtagaagcgcgcatcggcacgcccctgcagcgatgcggcgcagcgctgggcgtagtcgcgcagcgatgcctcggaaggcgcggcatcctcgtccatctgcagcggcttgccgtccgcgcccaggcagctgagcgggttggagccgccggtgccgcgctggtcgatcaggaacacgtcgcgctgcttgcgcacctggcgcagtgcggtatcgacgatgaccgccacctcgctggccgcctggccggggccgccggccaggaagaacaccgggtcgggctggctggcgccgctgctgcccgattccagccaggcgatgcgcaggccgatccggcggccatcgggctgggcccggttctccggcacctgcagggtggcgcactgcgcctccacgttggcgctggcgccttcggtggacaacgtgcagggctggaagtcgatcgtgccgaagcggcggctgggtgcatcgctggcgcttccggcggcggccggcggcggttggctgcacccggcaagcatcaggctggccagcatcccggccagcgcgaggtggtgtctttgcatcgtgctcgtttcccctggaggacgttcctgtcgaccacgacgggctgccgcggaagatgtgacccaacttacacgggcagcgcgccgacggcgatgggcaatgacgaatccgccgccgacggcgcgcagacctggcagtcccgcgctcggccttggcccgtgcagggcggcatcggcggcggccagcagcaccccaaggggccagtgttccggcccgacggcgatgcggggtctgaaaacggcgagcacggcgaccggcgcatgcgcacaatccgcggaaaacccaaggagacgcccatgcacgcgtggtacctaggcggcatcgaccaccgccctttcctgcacctgttcgagatgagcgacagcgcgctcgccacgctcggcatccagcgtcgctgggccggcgccaacggcggacatccctgccggatcagcctgagcgaccccgcgcctggcagcgagctgctcctgctgtcccacgtccacctgccgctgcattcgccgtaccgcgccgccggcccgatcttcgtgcagcgcggcgtgacccgttgcgtcctgccgccgggcgaggtgcccccgtatgtgcagcgccggatgatctcgatgcgtgcctatgaccacgccgcgctgatgtgcggtgcccaggtctgcgcgggcaccgaggtggccgaccacctggatgcactgtttgccgacccgtcggtggcgttcgtgcagctgcacaacgcggcgcatggctgtttctcgtgccaggcagatcgggtgggtaccgggactgcgtcgcgtgatctccatgacgtgatcgatgccacgccggtcacgtgacgtccagcgcatccgttcagccctgcgtgaagcctgcgggaagggcttcacatgcgcagtcacggatcggcactgcgatggttccgtcccctgcagtgcgactcgatactcgccgtggtgccgccgaaagtccgccgcgcagcgcagctcctgcggtcaccgttccctttcgacgaccacaaggatgcgccatgtcattccgatccacaccgctgttgctggccacctcgttcgccgctgcgggcctgtgcctggccggcagcgcgttcgcccacggcacgatgaccacgccggtcagccgcgtctatgcctgcttccagggcaatcccgagaacccgaccaacccggcctgtgccgctgcaaaagcgattggcggttcacaggcgttctacgactggaacggcatcaaccaggccaacgccaacggcaaccatcaggccgtggtgcccgacgggaagctgtgcagcggcaacaacccgaccttccgcggcctggacgtgaaccgcagtgactggcagaccacgccgatccaggccgatgccaatggcaagttcactttcgtgttcaaggcgaccgcaccacacgccacgcgcgactggcgcttcttcgtcacccgcgaaggctggcagccgggaagcccgctgcgctgggccgacctgcaggagttctgcacgctgggcaatacgccgctgtcggccgacggcacctacaagcttcagtgcacgttgccgcagcgcaccggccagcatgtgatctacaacacctggcagcgctcggattcgaccgaggcgttctatacctgcatggacgtgcgcttccagggaggcggagggaccgcaccggcaccgcaatggcaggacgccggcccggtcaccgcacgcagtgagctgccggttggcacgacgctggcgctgcgcgtgttcaacgccaacggcaatgacgtcgaacgtgtggaggccaccctggccagcggccagaccgcacccgcgcagtggccgttggtgctcgcccgcaaggtcaatgccagtgcccagcacgcgcgcgtgggcgtgcttgccaatggcgtgatcacgccgaccgcctcggccaccgacaaccgcgtgtacctgaaggacggcaaccgcttccagctcgatacccaggttcccgacccgggtacaccgtcaccgggcggtgatttcgaccacgtgtacccggcgggcatcggcagctatgtgccgggccagaccgtggtgaagggcagcgacggcaagctgtacgcctgccgcccgttcccggaaggtgcatggtgcaacgtcaacgccgaggcgtaccggccgggtgtgggtgcggcctggcgcgatgcatggattgcatactgagaccgggtacagggaacggtggcagagcgccgttccctgcatagcgtgagacgcgccagcgtgtgagtgggaagccgttcccatatgcaaccacgcgatgcttttttcaacgtaatccgatggatgcgggcgggcgggatgtcgagacttcgcggggtttcaccacccacaggagatctccatgcatctgtcacaccggaccgtcatcgcgctgtctgtgatcgcaggcattgccacctctggcagcgcgttcgcccacggcaccctgtccaaacccgccagccgtgtctatgcctgttaccagggcaatcccgaaaatccgaccaaccccgcctgcgctgccgccaaggccatcggtggtgcgcaaccgttctatgactgggccgggatcaaccaggccgaggcccatggcaaccaccaggccgtcgtgcccgatggcgagttgtgcagcggcggcaacagcaaataccgcggcctggatctgaaccgcagtgactgggagacctcgccgatccgagccgacgcccgtggccgctacacgttcgagttcaaggcgccggccccgcatgccacccgcgagtggaagttctatgtcacccgcgatggctggcaaccgggcagcccgctgcgctgggccgacctgcaggaattctgcacgctgggcaacgtgccggtctccggtgacgtctacaagctggactgcccgctacccaagcgcagcggccagcacatcatctacaacacctggcagcgctcggattcgggcgaggcgttctatacctgcgcagacgtgcgcttcgaggggggcggtggtgtgaccccgccgccgcagtggcaggacgcgggtccggtcactgcccgtggtgcgctggacgtgggcaccatcctgaccctgcgggtcttcaacgcccagggcaacgatctggaaagcccgcagatcacccttgccgccggccagaccgctgcgaaccagtggccgctggcactggcccacaaggtcaatggcactgcgcagcaggcgcgcgtgggggtgatgaagaacggcgtgatcacgcccgtcgcctcggctaccgggaaccgcgtctatctgaagccaggccacctgttccagctcgatacccgcgtgccggatccggtcgatccgatcgatccgccgccggctgacgactacgacttcgtataccccgcgggtatcggcagctacacgccgggccagaccgtggtgaagggcaccgacggcaagctgtatgcctgccgcccgttcccggaaggcgcctggtgcaacatcaatgcagaggcctaccgcccgggtaccggctctgcctggcgtgatgcctggatcgagtactgaaggcagggcaccgggggcggcgtggggtcgcctccggtttccagggttgccggccagcggccggcactaccggggttcatgcggttgccggccagcggccggcactaccggggttcgtgcggttgccggccagcggccggcactaccaggttcgtggggttgccggccagcggccggcaccagccggacctatttgctgctgacgtacttctcgcggcggatctgcgggttgcccaggccggcggccttcagcagctcggcgcaggcatcgaccatgtccgggttgccgcacaggtaggcgatgtccgtggccgggtccggcgtgaaaccggccagcgcctgctgcacgtaaccgtgctgcacgtccggatgcggatcggcgggtagttcgcgcgacaggcatggaacatagcggaagttcgggtgtttttcggcgaagctgtagaaatcctcgctgtacagcagctcgcccgggctgcgcgcgccctgcagcagcacgatctgcgcaccacgttcggccatggccttttccagcagcggcagcatcgagcggtacggggtaacgccggtaccggtggcgatcagcaggtagcgggcattgtggtcaccgggattcaggcagaagcggccgtaggggcctgatgcactgatctggccgccgtgctccagcgcctcgaacagcgcggtggcggcgccaccgggcacgaagctgaccgcgatatccaccgcctcgcccgggcccagtgcgtggtcgtgaatggtcgccagcgagtagctgcgcttggtttcggtgccatcggcgtagctgaaatggacctggatgaactggccgggctggaaatccagcggctgcccatcgtcacgcacgaactggtagtggccgacggtcggggccagcatgcggcggccgaccagcttgagggggaattgaacaggcacgacttttcgggacagtgtgtagccggggcaagccctcggggtcttctataatagcccctccccgcccctctccagcgccagcccatgggcgcgaaggcttcgagcttggcatcccagaacgatacggcgcccgccctgcgcgtgcgcgacctgcgcaagacctacgacaacggcacccaggccctgaagggggtttccctggaagtggccccgggcgacttcttcgccctgctgggccccaacggtgccggcaagtcgaccctgatcggcatcatcagctccctggtcaacctcagcgagggccaggtggaggtgttcggcagcgacctggtgcgcaatcgcagcgccaccatgcgcctgatcgggctggtgccgcaggaaatcaacttcaacctgttcgaaaagcccttcgacatcctggtgaactacgccggcttctacggcgtgccgcgcgaggaagcggagcagcgcgccgaagaggaactgaagcgggcccacctgtgggaaaaggcgcaggtgatgagccgcacgctgtccggcggcatgaagcgccggctgatgatcgcccgcgcaatgatgacccgcccacgcctgctgatcctggatgagccgaccgccggcgtggacatcgagatccgccgcgacatgtggcgcgtgctgaaggagatcaacgctgccggcaccacgatcatcctcaccacgcactatctggaagaagccgagtacctgtgccgccacctggcgatcatcaaccatggccagatcgtcgagcaggggccgatgcgcaccctgctggccaagctggacgtggagggctttctgctggacatcgacggtgacctgccggcgcagctgccggtgatcgagggcgcgaccctgaccgcgccggacccgcacacgctggacatcgacatgccgcgcgcaatggacctcaaccgcgtgttcgccacgctcaacgaggccggtatccgcgtgcgttcgatgcgtaccaagagcaaccgcctggaggagctgttcgtgcgcctcaccggcaacctggagaagcctgcatgagcaccaccgagctgaccgacggccagcgcaaccgcatcgcactgatgaccatcgtgcgccgcgaagtcgcccgcatcatgcgcatctggggccagaccctggtgccgccggcgatcaccatgaccctgtacttcctgatcttcggcaacctgatcgggtcgcgcgtgggtgacatgggcggctacacgtacatgcagttcatcgtgccgggcctggtgatgatgagcgtgatccagaacagctacggcaacatcagttcctcgttcttcggtgccaagttcggccgccacgtggaagagctgctggtcagcccgatgccgaactgggtgatcctgtggggctacgtggccggcgccgtgctgcgcggcctgatggtgggcgtgatcgtgctgatcatcgcgatgttcttcaccccggtgcgcattccgcacccgctggtgatgctgaccacggtgatcctgggcgcgacgatcttctcgctggccggtttcatcaatgcggtgtatgcgaagaagttcgacgacgtggcgatcgtgccgaccttcatcctgaccccgctgacctacctgggtggcgtgttctattcggtgaagctgctgccgggctgggccgaagcggccacgcacgcgaacccgatcttctacatggtcaatgcgttccgctatggcctgctgggcagcagcgatgtgccgctgccggtggcctatgggttgatgatcggcttcgtggtggcgctgacggcgctggcgctgtggctgctgcgccgtggcgtgggcatgcgcagctaaggggggcctgcagggcctgcggccctgcacccgccgaatcaacgtcaacttcaacggcaacgtcaaaagctggcattccttgggttggcgaggtgggtccgattgcgggggacgccgtaaacccatccctgggggcttggccgcggcatccatgccgcggacacccccgcaatcggccccaccccgccttcgacaaattccggcgatctgccgggatgtcgttctccgctgctgctggtaggtgtcgaccttggtcgacacgatggatcgacgccatgcgtggatggagctttcacggcaaagccgatgttccgcttttctcgttcgggattgcagctaggctgtggcgatgaagatcacttccattgcgctggacaaagccgtgtcggacggccccatcgatgccttcagccatgcgttgctgggcgattcacccacgctggatgaggtgctggaatacctggcctcgcggcacgcggctgatccccggtatcgctacctgtgcacgctcgatgatgccggccagtgccgctacaccagcatgcacgcgtcagacgacgcgcgtatcgcgctctacgaggacgaagacccggcaacccccgacgatgcgttggcggcacgcgggcggttgctggcgcatgtggtcgcgcagcttgagcattcgacgcatcggctggaatggagcacgctggcgggcacgctgatgtgcaatgacgcagacatcgaggcattggtcgcggccaatgccgcaccggatctcatcgtcgacgaggtggtctgcgtgcaacaggtgcccgtggatcgtgacgacctgctgatcgccgccctgcccaacggctacttcagcgcggactggaacatcttccagaaccacgccctgatccggcacctgcaagagcattacgactaccgcctgttcgggcttggcgcatcgtggctgggcttccagcgtgacagcgcgccgtcgcctgcggaagcggacgctctggtcgcggacctgcagcgcgtctacgctgccggaacgcacgacacctggtcacaactggctgcaacgctgtcctcccgcaccacgcttctattgggatacaccgaaggcttcagcgaacagctgccctgagcgcggttctacacgcgctcgcgcagcgagcggcccgcttccgctcctgatctgtcttccgtggtggccgcacccggccaaccccactgaaccgtgcttcccgcgaaccaccacgaggggcaccgccgttggccgcgatctccggcacaatcgaaatcctgattccccagaacacggtgaacgtgcaatgcgcatcctgatcctcggcgccggcggtaccggcggttacttcggtggtcgcctggcccaggccggtgtggacgtgaccttcctcgtgcgccccgcgcgcgccgcccagctggatcgcgacggcctggtcatccgcagcccgctcggcgatgccagcttccccgtgcagcatgtcaccgctgatgcactgcccgcattggccgcgcagaagccgttcgacctggtcatcctcagctgcaaggcctacgacctggacagctcgatcgacgccattgccccggccgtgggcgcaggcaccaccgtgctgccgatcctcaacggcctgcatcactacaacgcactggacgcgcgcttcggccgcgacgccgtgcttggcggcctgtgcttcatcagcgccaccaaggcccccgacggtgcggtgctgcacctgggcaaaccggccaagctcaccttcggcgagcgcgacggcggcgcggcctcggcgcgcgtgcgcgccttcgctgcggtctgcgcgcaggcccatcttgatcacctggccagcgaacacatcggccaggaacaatggatcaagtacaccttccttaccgcgctggcggcggcgacctgcctgctgcgcgccgacatcggcaccatcgttgccaccgatgatggcgaggcgatcgtgcgcggcctgtacgacgaatgcctggccgtggccgaagccgccggtgaaccggttcccgaggccgcgcaggacaccgcgcgcggcaccctgacccaggccggctcggcactgaaggcatcgatgctgcgtgacctggaagccggccaacaggtggaggccgaacagatcgtcggcgacatgctggcccgcgcgcgcaaggccgaccaggaagccctgctgctgcaggtcgcctacagcagcctgcaggcctaccaggcactgcgcggcgcgtgagcttcatctctgccgccagtgcattgccctcgcgggtgctgatcctcgggctgggctggagtggcggtgcgctggcccgacatctgcaggcattgggcgcacacgtcgccggcacggtacgcgatcccgcatcggcaccacgcgatggtctgcgtcgccatccgctggctgccgatgccacgccatcgcccgccctgctcgatgagatcgcgcaggccgaggccgtgctgtgcagcgtgccacccgatgccgatggcgatcctgcactgcgcctgctgttgcccgcgctgctggccagcccggcattgcgctgggtgggctatctgtcgtccacttcggtgtatgccgaccgcgccggcggctgggtcgacgagcgcagcgcagccgatgccactgaagcagccggcgtgcagcgcctgcgggccgaagcgcaatggcgtgcgcttgcaggagaacgcggcatcgcatcggcagtgttccgcctgcccggcctgtacgggccggggcgcaatgcgctgctgcagctggcgcagggacgtgcccgccacgtagtgcgtcccgggctgctattcaaccggctgcacgtggatgacctggtgacggtcgttatcgcgtcgatgcagcggccgtgcgtggatggcctgtatctgccggccgatgacgagccggcaccgccgcaggaggtactggccttcgccgcgcagctgggcgggtttgcgatgccacctgccgtggcatgggacgaccctgcactcagcccgaccctgcgacgcttctaccagagcaacaagcgcatcgacagccgtggcacgcgtgaagcactggcgtgggcgccgcggttccccagctaccgtgagggcctgcgcgacctgctccggtagtgccggccgctggccggcaatcaaccgtgttgccggccagcggccggcactaccatcaacctgcgccgggcaggcggaagaacgtacgcgtcgcggccgttgcgttcgcggcggtcactgccacgtcctcgccacggtcacgcgccagttcttccacgatgtgcgagagaaacatcggttcgttgcggcggtccttcggcatcggcttcagcgtgcgcggcagcaggtacggtgcgtcggtctcgatcatcaggcggttggccgggatgttcttcaccagttcgcgcaggtgcgcgccacggcgctcgtcgcacagccagccggtgatgccgatgtaccagtcctggtccaggtagtcgaacagctcgtcacgctcaccggtgaagcaatgcaccaccgccgggccgatgcggccttcgacgttcttcatctgtgccatgaaatcggcatgcgcatcgcgctggtgcaggaacaggggcttgccattgtccgcggccagctgcagctggcgctcgaacgcgcggtgctgggccgggcgcggcgagaaatcgcggaagtagtccagcccgcactcccccaccgccactacttccgggtgggcatgcagcgcgcgcatttcggcatcgcattcctcggtgtattccaccgcgtggtgcgggtgcacgccggcggtagcgtacaggaagccggggtgctgctgggccaactgcagggccagtggcgagtgctcgcggctggcaccggtgatgaccatctgcaccacgccggcctggcgcgcgcggtccagcacggcatcgcggtcgcggtcgaaggagtcgtgggtcaggttggcgccgatatcgatcaggtgcatggtcatcgcgggggaaaagtgcccgcgcattgtacctgcgcctgccgtggccccttatcctttgcatatgaacgccccgctcttcccgatttccccgctgctgccgcagatccagcagcagctggccgtgcaaccacggctggtgctggaggccccgcccggtgccggcaagaccacccaggtgccgctggcgctgctcgacgcgccgtggctgcagggccgcaagatcatcctgctggaaccacgtcgggtcgccgcgcgcagcgcggcgctgttcatggcacggcagctgggtgaggaggtcggcggcacggtcggctaccgcatccgcttcgagaacaaggtatccgcgcgcacccgcatcgaggtggtcaccgagggcatcctgacccggatgctgcaggacgacccgatgctggaaaccgtcggcgcgatcctgttcgatgaattccacgagcgccatctcagtggggatctgggcctggcgctggcgctggacgtgcaggcgcagctgcgcgacgacctgcgcctggtggtgatgtcggccacgctggacggcgagcggctggcacgcttcctcgatgcgccgcggctgagcagcgagggccgcagttatccggtggcgatcagccacttcccggcgcgccgcgatgaagccctggaactgcaggtgcgccgcgcggtgcagcaggcactggccgagcaccccggtgacctgctggtgttcctgcccggccagcgcgagatcgcgcgcgtccaggccggcctgcaggagtcactcgatggcaacgtcgaggtgctggcgctgcatggcgagctgccggtcgaacaacaggcgcgcgtgttgcaggccgccagcgatggccgccgtcgcgtggtgctggcgaccaacgtggccgagtcgtcggtgaccctgcccggcgtgcgcgtggtgatcgacagcggccaggcgcgcgagccgcgctacgaccccaacagcggcttcacccggctggacgtggtggccatcgcgcaggcgtcggccgaccagcgcgcgggccgtgccggtcgcgtggccgagggcgtggcctggcggctgtggccgcagtcgcagcggctggagccgcagcgccgcgcggagatcgaccaggtggaactggccggactggcgctggaactggccgcgtggggcagcagcgacctgcgcttcctcgacccgccaccggccggcccgatgggtgcggcgcgcgaactgctgcaacgcctgggtgcactgtcggactcgggcgcgatcaccgcactcgggcgccgtgtactggcgctgggtacgcacccgcggatggcggcgatgctgctggcagcgcccgatgcccgcgcgcaggcgctggccgccgatctggccgccctgctggaagcgcgcgacccgctgcgccagggcggtgacgcgctggcggcccgctggcgcgcactggccgcgttccgcactggccgcgcgccgggcgatgccaaccgcagcgggctggccgccattgatgccgccgccaagcagtggcgtcgccgcctgcgctgcgaggctgcgccgccggccagcatcgaggcgcacgaactgggcgatctgcttgcacacgcctttcccgaccggatcggtttccagcatcccggcgatccgctgcgctacctgctggccaatggccgcagcgcgcgcctgcacgaactgagtgacctgcgcggtgagccgtggctggtggccagcgaactgcgcttcgaggcgcgcgatgcgctgctgctgcgtgccgcaccggtggatgaaggccacctgcgcaaggcatggccggagcgcttcgtcaccgaagacgtggtgcgctgggacagcgagcgacgcgccctggtggcgctgcgcgagacccgtttcgaccggatcgtgctggacagccgctcggccggccgggtcgatccgcagcacgccgcgcaggcgctgaccgatgcggtggccgagctcggcctgcaggcgctgccgtggaccgagggcctgcgccagtggcaggcacgggtggaatcgctgcggcgctggatgcccgagctcggcctgcccgactgcagcgacgatgccctgctggccacgcgcgcacaatggctgcagcccgcgttcgccggcaggacgcgactggatgcgctggatgaatccagcttcggcgaggcgctgaaatcgccactggagtggtcacaacggcagttggtcgagcgtcatgcgccgacccgcatcaccgtgccgtccggactggagcggccgatcacctatgcgctggacagcgagagcggcgatccgctgccgccggtgctggcggtgaagctgcaggaactgttcggcctggccgacacgccgcgcatcgccgatggccgcgtgccgctgaccctgcacctgctctcccccggcggccgcccgctgcaggtcacccaggatctgcgcaacttctgggaaagcacctacgccgaagtgaaaaaggagatgaagggccgttacccgcgccacccatggccggatgatccgtggacggcgacggccacgcaccgggccaagccgcgcggaacctgattggtagtgccggccgctggccgacagccccctggcaccaggcggagagcattgccggccagcggccggcactaccgggtgcggagcctgcctgatcctgaatggctgcggtaaagtcacaccacgtgcgtccccgactgacataccgtttacgggcaacacgcgacactggacttcgacccgaggcaaaggacccccgcatgagcaagctgaccgtaatcaccgaccgcgctctggagcgcgccctggagctggcccacaccgccggcgatggcctgaagagcgccggtggcagcctgcgcaacgcggactggatcaagaccggcgccgccctcggcgcagtgaagaccggcggcaaggtcgccaccaagttcgcccgccgcaacccggccgtgaccattgccgcggctgccgtcggcgtcggcctgctgggctatgcgctgtaccgcaagcagcagaagaagaaggctgccaatggccacgtggtgaatgggcaggcgcagcgcatccacgcacgcgaccgccgcaacgacaccgtggtggacgagcacagcgatatcggcagcgacgcgtgaagctgcccgggtcagagcccttccgcaggaagggctctgaccctaccagctacgagagggccggatgccgcgaggtatccggccctttctgtttcaaccgatctgccgccactgccccggctgcaggtcgtccagccggtagggccccatcgccacccgcaccagccgcagcgttggcaggttcactgccgcggtcatccgccgcacctggcggttgcggccctcgcggatcgtgatcgccagccaggcatcgggcacggtcttgcggaagcgcaccggcggatcgcgtgtccacagcgacggcgccggatcgaggcgctcgatcttcgccggcaaggtcggcccgtcattcagctccaccccatcgcgcaaccgttgcagctgctcatcgctgggcgtgccttccacctgcacccagtaggtcttgtcggccttgtgcttcgggtcggtcaacgtgtgcgccagcgtgccgttatccgtcagcagcagcaggccttcgctgtcatggtccaggcgaccggcggcatacacgcgcggcggcaggccgaacccggccagcgtcggccgcggcggtacgctgcggtcggtgaactggcagagcacgttgaagggcttgttgaaggcgatcagcattgcgggcacggcagtcagcgggtggcgcattgtcccatgccgcgccacgcgccactcggctgtacagagtcagcatgcgccagcccggcacccctcttacggcttgatgaagcgcagggtcatgcggtcgctttcgccgatcgcctggtacttcgcatcatcggccttgtcgtgctggttggtcggcggcagcgtccacacgccgttcgggtggtccttggtgtcgcgcgggttggcgttgacctcactgcgcgcgtccagcttgaagccggcggcctcggccatcgcgatcacctgctgctggccgacatagccggtgtcatcgtcgtcagccacgtcggccttggcgcggtgctcgaccacgcccagcacgccgcccggcttgagcacgttgaagaagccctggaacatgccctgcgcctggccggccttgcgccagttgtgcacgttgcggaaggtcagcaccacatcggctgaaccggccgggccgaacaccggcttggccggatcgtaggccaccacggcagtcttgccgaactgtgccggtgcagcggcgtacttcctttccaggctgtcgcggctgcgctgctggtagtcacggccgcggccttcgggcaccgccatcggatcgaccaccgcagcgacgtagtggcccttgtcgtgcagcagcggcgccaggatctccgagtaccagccgttgccgggggtgatctcgatgacggtcttttccggcgtcaccttgaagaacgacagcgtctgcgccgggtggcggaaaccgtcgcgcttgacgttgttggcatcgcgggtgggcgccttcaccgccgcgtcgatgaccggcgacacctggatcttcgccggcgcgaccgtggccggtgcggcaaacgcgggaacagcggcaagcagggccgaagcaagcagcaggcggcaaccacgcagggacgaagcaggcatcatcggagcgactccagcggaagatgcggcgagactagcagccgcggcgccccaggtgttcacaaaacgttagccgcgtgcgtatcgcggaacactgttttgtggtcgccgccgcagcacggtcacactacgcgttttattctggagcacttcccccaaggagtccgtgcccatgacggcaacccgcgaactgggccgttccggcctgcatgtacgtccgctcgcctttggtggcaacgtgttcggctggagcgccgatgagaaggccagcttcgccctgctcgatgccttcgtcgacgccggcttcaacctggtcgacaccgccgatgtgtattcggcctgggtgccgggcaacgccggcggcgaatcggaaacgctgatcggcaaatggttcgcgcgcagcggaaagcgcgacaaggtggtgctggcgaccaaggtggccaaatgggccgaacgccccggcctgaccccggacaacatcaatgcggcggtcgaggattcgctgcgccgcctgcagaccgacgtgatcgatctgtaccaggcccacgaggatgatgagtcgacgccactggaagcgaccctggccgcgttcggccgcctgatcgaagccggcaaggtgcgcgccatcggtgcctccaactacagcgccacgcgcctggccgatgcgctgaaggtgtccaccgactacaagctgccgcgttacgaaaccctgcagccggagtacaacctgtacgaccgtgccggctacgagaaggagctggaaccgctggtgcagcgcgaacagatcggcgtgatcggctactacgccctggccagtggcttcctcagcggcaagtaccgcacaccggccgatgcggccaagagcccggcacgtggcgaaacggtggtgaagcgctatctgaacccgcgcggcctgcgcatcctgcaggcgctggatgacgtggccagcaagcacaatgccagcgccgcacagatcgcactggcatggcagatcgcgcggccgtcgatcaccgcgccgatcgtcagcgccaccagcgtcgaacagctgcacgatctgctggcagcggccaacgtgtcgctgagcgtgcaggatgtcgcgcagctggatgccgccagcgccgaagcgtgaggcccggtagtgccggccgctggccggcattgcacaacagcgaagaaaataattgaacaaaatggttgcacgcgactaaatcgtggtttatcgtgcgcacctcgtttcaacaacccttggaaacttcccttgaacgcgcattccgtcgccatcgccaaactgctgccatgcctgcgcatggacgggctggcgcgcgcgtttggcaaggaagaccagctgacaacggcctgatacccgccctgcggagatcggcccccccgatctccgaggcctgacgacgccctcggaacgcaagtcccgggggcgttttcgtttgcgtcggcacaaggacccgcgatgccagaactgcaccccgcgcggcaacccgccgctcactgacccaggtttctcccgccccgccgaaggatttacttcgcgcgatcggctgcgcccggacattatctgcatcgcatcaaaacattatcgctcgtcgataatgtcggtggcctgcaccctcgattctccaacggtcccgtttccatcacgggctggtgcgcgcggcgttgccgtggcgtatgccggaggtcgcggacatgccatcgcctggatcgcctgctggaggcaggcgccggttcgccggtacgcggttcgattccgcgcggtccccaactggatagctcagtagggtagagcaacggatcctgattccgtctgtcgtgggttcgactcccactccaaaccacatgacctgtcacgtcatgacttgaagcaacacccggggcgcaagccccagcggccatcgtcgccgtccaccgccatcgccttcgggcggggcgtggaaggcaacggaccgcacgccgggccccggcccgccgccactgccagccacgttccgccccggtgctgcctgccgggaacggcgatggcagcactgccggcgcaccgaaggctccgcgcgcggaccgtccgccgatggccgccctcttccgctgcctgcacgtggtgtgcaggcggccgcgccacgacctgatcgacccgggtcatggcgattcatccgcaacgggtcgaaccaccagagccatacaaggagagactcccatgttctggaccatcaaggtcgtgatcggcgacggcgagcgcggcctggtgtatcgcaaccgtcgtttccagcagatgctgctgccgggcgtgcaccgcctgtcgccgttcggcggccgcccgcacgtggacatccacaccgcatcgaagggcgcggcctataccggcagcgaccaggacagcctgatcgaggcactgggcgcgacgctggacacgcacttcgtgctggccaatgtcagcgccaccgaagtcggcctgttgctgcgcaacggccgcatcgatgaagtgctgccgccgggcagccgccgcctgtactggcggggttcggtcgacacccaggtacgcgtgatggcgctgggtgacgagccgcgcatcccggcggacgtgcagcaacgcctgggccagctgggcgtgctgccgcgtgtggcggtgatcagcaccgtgccaagcgagtcggtcggcctgctgttcatcgatggcacgctgcggcagacgctggacgccggcctgcacgcgttctggaacttcaacggcaacgtgtcggtggagcgcgtggaactgcgtgcacgttcgctggacgtgtccggccaggagctgctcagccgcgacaaggtgaccctgcgggtgaacctggccgcgaccgtgcaggtgatcgacccggtgcgtgcacaccgcacgctcagcaatgccgatgagttcgtctaccggcagctgcagttcggcctgcgccaggcgattgccgcgcgcagcctggacgagctgctgggcgacaaggcggcgctggacggcgagatcgccgcccatgtgcaggccgcgatcgagggccacggcgtgcggctgctcggcgtgggcatcaaggacgtgatcctgccgggcgagatgaaggagatcctcaatggcgtggtgctggccgagaagcaggcccaggccagcgtgatccgtcgccgcgaggaggccaacgccacgcgttcgcagctcaacaccgcaaagctgatcgaggacaacccggtgctgatgcgcttgaaggagctggaggcactggagaaggtcaccgagaagatcgacacgctcaccgtgttcggcggcctggatggcgtgctgaagcagctggtgacgatcaggtagggggtagcggcggcgcagggacgcgccgccggcccatcaaggacatacacgaagacatggacactcaacacaactatcaatggctgcacgccgagggcaccacgccgatcaagggctgggtcaacggtgtgccgctggaagcgcaggcgcatgagcagctgcgcaacatcgccgcgatcccgttcgtcgggccgtgggtggccgtgatgccggacgtgcacctgggcaagggcgcgaccgtcggctcggtgatcccgacccgcggtgcgatcatcccggccgcggtcggcgtcgacatcggctgcggcatggcggcggtacgcaccacgctgcgcgccaacgacctgcccgacgacctgcggcagctgcgcaacagcatcgagcgcagcattccggtcggcaacgggcgcggcggcgagcatcaccgcatgcccgacagcatccacacccggctggtgcagtccgggctggccgccggcctggagaagatcaaggacaggcaccgcagaatccgcaccgacaagctcgaccgccagctgggtacgctgggtggcggcaaccacttcatcgaactgtgcctggacgagacggacacggtgtgggtgatgctgcacagcggatcgcgcggcaccggcaacctgatcggcacctacttcatcgagaaggcgcgcgaggaactggcccggcgcgtgctcggcttccacctgccggacaaggacctggcgttcttcatggaaggcgagccgctgttcgatgactacgtcgaagccgtgtcgtgggcgcaggactacgcccggcagaaccgcgaggcgatgatgtcgcgcgtgctggccgagatgcgccaccgcttgccgaagttccagctggcagcgatggcggtgaactgccaccacaactacgtgcagaaggagacgcaccacggccaggaactgctggtgacccggaagggggcggtgagtgcgcgcgaaggcgagctgggcatcattcccggcagcatgggcacgcgcagctacatcgtgcgcggcaagggcaacgccgacagcttccacagctgcagccacggtgccggccgggtgatgagccgtggcacggcgcgccagcagatcacgctggcccagcaccgcgaggccaccgcgcacgtggaatgccgcaaggacagcggcgtgctggacgagtcaccggccgcgtacaagtcgatcgacgatgtgatggccgcacagctggacttggtcgaggtggtgcacaccctgcgccaggtgctgtgcgtgaaggggtaacggagcagtgccggccaaggccggcctctaccagagcagtacgtcgcgtcgggggtcagatcgctttctgcgaaagggatctgaccccgccacattcagcgcggcacgctgtcttcggccaccagcgcatgatgcacgccgatgcccgcgcgcacgccttcggccatggccagggtgatgttgccgaccgtcgtcgcatcgcctgcggcgtacacgttgggcaccgaggtctgcttcatcatgtcgacctcgatcagcacccccagcgggctctcgaccaaggtgcagccaagctgctgcaccaatggcgtggccatcgcctgggtggccggtacgaacagcgcacgctgggcgatgcggcggccatcggccagctccacttccagccaggtcggctggtcgccctgcacgcccagcaccggcgaggtctcgatctgcacgccgcgctgctgcatggcagcccgttcctcatcggtgatcggcaggccctggctgaagaaggtgacattgccccagtcggcaaacagcggcgccttgccggcggacatcggatggccgccaagcaggccgatggcgccgccacccacttcgtaaccatggcagtaggggcagtgcagcacggtgctgccccagcgctcggccagcccgggcagttccggcagctggtcggcgataccgctggccagcagcagcttgcgcgcggccagcacctggccatcggcggtacgtacttccacgccctctgcgctggcgttggcctgcacagcctcggcatgcacccagcgcacgctggggtaatccagcagctgctggcgcgcggtcttcagcagctcggcgccgctgatgccatccagccctggcaccccgtgcgaatggttggcgaagcggttgcgcggcgagccggcgtcgatgacggtgaccggccgccgggcgcgggccaggatcaggccggcggcaatgccggcgtagctgccgccgacgatgagcacatcaggattcatgaggaccttccagggaacggtgatgggcgagatggcgggcgaagtcggcgccgagctggtccagcgtggtcgcccgcaggcgcgcctccagcaaccgctgtgcctcgcgtgccccctccagcagcgcgctgttgaccagctgctggatcgggcagccgccgccggcgtcgcgggcgccgacctgcaccagcggtggtgcgcccacggccaggtagatgtcatgcagggtgatcgttgcagcgtcgcgggccagctggctgccaccgccatgaccgcgggtgctgcgtaccaagctggccttgtgcagctgcgccagcagacggcggatcaccaccggatgggtcggcaggcaggacgccagctgcccggaggtgcgcgggccatcctggccgaccagatgcgccatcacgtgcagggcgtcagagagcgggttcgcggatttcatgtaactacattagttacatttatatcccctgtccagggtccgtatttgttccatatggacacatttgtcctatgaaacacttccttcacatcactaaacgaaacgctaatgtgatgttcgtcgcacttcagcggaagcgtagcgggtcgataccgcattgccccttcccgagagtgcttcccgatgaatgcgtctgtccgtgctccgcgcctgcagtccaagctgctcggcgcggtttctgttggcttggccgtggtcctgctgtgcgcgctggcaggcctggcctccgcctggttgaagttgtccaccgaggtcccgcccgaagtcgcgcacagccgcgatgccgaacgcctgcagcgtgagttccgtggccaggtgcaggaatggaagaacgtgctgctgcgcgggcacgacgatgcgctgcgccaacgccacctggatggcttcgacagcgaaggccgcctggtcgggcaactggccaagggtctggccaccagcccggacccgcgcacgcgtgagctggcgcaggcgttcgttggcctgcacgcgcagctgcagcaggactatcacgcggcgctgcaggcatttgccgcggccggctacgatcccgcggccggcgacaacctggtgcgcggcaaggatcgcccggtggcgatggctctggatgcgctgagcacgcacgccacgcaggtggctgaagcggcggtggcgtcccgttcgcagcaggcccggcagaccctgctgctgtgcgcggcgctgaccgtgctggccgccgtgctgctgctgatcggtctggcctggtggctgcggcgtgcggtggtgcagccggtgctggcagtggaagcagcggcgcgcgcggtggccgccggtgacctgcagcacgcagtacaggtgcgcagccgcgacgagatcggtcgcctcgcgcaggccatgcaggcggtgcaatccacgctgcgcagcgtgctggatgcacaggccgcgatggcgcaggcgcacgaagccggcaccatcagccatcgcatggacgccgctgccttccccggcgcgttcggcaccatggtggccgactgcaacgcactggtcgatgcgcacatccgggtgaagatgcgcgcgatctcgatcatgggccgctacgcggtcggcgacctcagccaggacatggaacgcctgcccggcgagaaggcggtgatcaccgaagcgctggacatggccaagcacaacctcggcctgatcaatggcgagatccgccgcctggccgaagctgccggcgcgggagacttcagccagcgcggcgacagtgcccgcttcgagcatgatttccgtgcaatggtcgaaggcctgaaccgcctgatgcagacgacggagctgaacctgggcgaggtctccagcatgctgcgcgcgatcgccgatggccgcctcggtgcacgcatgcacggtgatttccagggggtgttcgcccgtatcgccggcgatgccaataccaccgccacgcagctggccaccatcgtcaccgacatcaagcacgcctccggcaacatccacaccgccgccgcggagatcgccgccggcaacaatgacctgtcgcgccgcaccgagcagcaggcggccaacctggaggagaccgcggcatcgatggaggagctgacctccaccgtgcgccagaacgccgaacatgcgcgccaggccaaccagctggcgatcggcgcccatacggtcgcctcgcacggtggcagcgtggtcggccaggtggtggcgacgatgggcgcgatcgagacctcgtcgcggcagatcgccgagatcatcagcgtgatcgatggcatcacgttccagaccaacatcctggcgctgaatgccgcggtggaagcggcacgcgccggcgaacagggccgcggcttcgcggtggtcgccagcgaagtgcgtacgctggcgcagcgctcggcggcagccgcgaaggagatcaagtcactgatcgaagcctcggtggaacaggttggccatggcgcacagcgcgtgcgcgaggcaggcgacaccatggccgagatcgttgcatcggtgcagcgcgtgaccgacatcatggccgagatctccgcggcctcgcaggagcagagcgcgggcatcgaacaggtcagccagaccgtgatccagatggacggcacgacccagcagaacgccgcgctggtggaagaagccagcgccgccgcgcgcagcctggagcagcaggccaaccgcctgatcgatgcggtggatgtgttcgacctgtcgaccacagcggcggcgaagggcgggctggcacgcgcggcttgattgatccggttgccggccagcggccggcactaccgtggagcgcagacagggggagtgccggccgctggccggccgcgtccaacgctgcacgggtggcggcatgaacagtgcggaccaacggtccgcacccaccactacctgccgtcgtacacgtcgatgcaatgcacgttgccggcatgcacacggccgctggcctaccctttcgtggacattcccgcctccctccccctctgctggagcccccatgactgtccccgccttcggtctcggcaccttccgcctgaaagaccagaccgtgatcgactccgtgcgcaacgcgctggcggtcggctaccgcgccatcgataccgcgcagatctacggcaacgaagccgaggtcggccaggccatcgccgattccggcgtgccgcgcgacgacatctacctgaccaccaaggtctggatcaccgcgttcaagcgcgatgcgctgctggccagcctgcgcaccagcctggaaaagctgcgaaccgagtacgtcgacctggcgctgatccactggccatcgccgaacgacaaggtcgacgtgccgatggaggagtacctggccgcactggctgaagccaaggcgcagggcctgacccgcgagatcggcatctccaacttcaccatcgcgcagacccgcaaggcgatcggcatcctcggcgccggtgccattgccaccaaccagatcgaaatccacccctacctgcagaatcgcctgctggtgaagttcctgcaggacaacggcatccacatcaccgcctacatgagcctggcctacggcgaggtgatcaaggacccggtgatccaggccattgccggacgccaccaggccacgccggcgcaggtcgcgctggcctgggcgctgcagcagggtttctcggtcattccgtcctcgaccaagcgcgagaacctggcgagcaacctggaagcggcagcgatccgcctgaccgacgaagacatggcacagatcgccaagctcgaccgcggccatcgcctggccaacccggaaggcatcgccccggcctgggattgaggcagtggtgctgtagagccgagcgcacgctcggctgctgcctccccggagccgagcatggctcggctctacaggtaggtgccgaccttggtcggcactgagccctgatcgatcgttggaacaccgtgccgaccaaggtcggcacctacgagagggtggggatcatcccctgccctgcagcaaccacccacgcatcgccgcactgacctcgtccggtttctccatcggtgccaggtgcccgcagtcaggcaccaccaccagctgcgagtgcggcaccatcgcgtgcatttcctcgctcaccgccagcggcgtgatgcgatcgttcgcgccgcacacgatcagcagcggatcgcggtagccggccagcacatcatggccatcgcggcgttccagcgcgctctggcgcaggaacacgtccgcgcccaggcgggcggtcatgtcgcgcacgcgctgcaccagcacgtagtcatccagccgcgacgcatcgatgtagctgcgcatcagcacatcgccgaagccgtggaacttccccggcaggcgcacgctggcacgttggctgcggcgctgctcggcacgttccggtgaatcggcgtggatcgaggtatcgatcagcgccagctgcagcacgcgctccggcgcaatgcgcaggatctgctgggcgacgaagccgcccaatgagaaaccggccagcgcaaagcgctccggtgcctgtgcgagcacgtcctcggccaccgcctgcagggtctcgccacgggtctggtcgcctactgtgcagtcggcgatgtcggccaggtcggccagctgcgcgcgccacagctcggcatcgttgagcaggccgggcagcagcagcaggggaatacggtcggtcatgggggtattgtcgcgccagcacggtgacggaaccatgccgcaacaggcggttgcgttgtagagtcgcgccatgctcgactgctgcacggcccgtcgagcatggctcgactctcagaaggcagcgatacggacgcgaccatggcagacccctacaacagcggtacccccaccccacccgcgctccgcttcgatgatgcgctggtcaccaccgccttcgagctgcctgggcaccgcgtcgtgcgcaacctcggtgtggtgcgcggcatcaccgtgcgctcgcgctcgatcgtcggcaacttcctcggcggtatccagacgctcttcggtggcaacatcaccatctataccgaactgtgcgaacaggcccgcgaggaaacctaccgcgacatggtcaagcatgcgcggcagctgggtgccaacgcgattatcggcatgcgctacgacgccaccgatgtgatgaccgggcttaccgaagtgctgtgctatggcacggcggtggtggtggagccgatgcgttgaagctatagagccgagcccatgcccggctcaggcgtgcccgtgtgatgcaaggcagccgagcataggctcggctctacaggaatcaggccaccggcgggacgtcgggcacctcgacctgctgcaccggcagggtcaccatcatcaccgtcgggtcgtccgggtccagcttcgtcttgaagcccaggctctggcacatcgccagcatggtgctgttctcgcgcagcacctggccttcgaccacgtccagccccagccacttggcgtactcgatcatgatcgccatcagccgccagccgatgccgtggcccttcagatccgagcggatcaggatgccgtactcgccacggtggtaatcggcatcggcgtgcaggcgcaccgcgcccagcatctcgccgctgcgcggttcgatcgccaccagcgcaatcgagcgcgcgtagtcgagctgggtcaggcgcgcgatgaactcgtggctgaagtgcttcaccgactggaagaagcgcaggcgcaggtcctcgtcgctgacgcgggcgaagaacgcacggaacagcgcgtcgtcctccggccgcaccgggcgcacgaaggcacggccgccatcggacagttcgatggtgcgctcccactccttcgggtacgggaacaccgagaaacgtggatggccgcggcccttgtgcaggatgcgcgacggcgccaccgccacgcgggcgtcgagggcgaggatgcccttgccgtcgaccagcaacgggttgatgtccagcgtacgcacttcgggaatgtcggcggccagttgtgccagcttcaccagcgccagcgccagtgcgcgctcgtcagccgccggcacgtcaccgtaggccttgaggatgcgcgaggcgcgggtctggccaatcagctcgtgggccaggcgcaggtccagcggcggcagcgccagcgccttgtcgttgatcacttcgacggcagtgccgccgcgaccgaccacgatcaccgggccgaacgtcgcatcatcggcgatgccgacaatcaactcgcgcgccttcggacgcacgatggtcggctgcaccagcaggccgtcgatacgcgcatccggccgcagctggcgtgcgcgcgacaggatcgcgttggccgcgctctgcaccgccggcagcgtggacaggttcaggcgcacaccatccacttccgacttgtgcggaatatccggcgagagaatcttcagcgcgaccgtggcaccgcgttccagcaggggctgcgccaggtccatcgcctcgtgcgcatcacgcgcatgcatcaccggcgcggagggaatgccgtaggccttgagcagttcatgcgtagccagcgggtccagccactgctggccgttggccagcgcggcatcgaccagtgcgcgcgcggcggccgtgtcgacgctgaagtcctgcggcaggctgggcggcgtttccatcaacgcgttctgcgcttcgcggtagcgcaccagatgctggaagccacgtacggcttcggcctcggtcggataggtcggcacccgcgccgcgttgagcgtggcggtggcctggtcgtcgttgcccagccacaccgcgaacaccggcttgtcgcggtggtggcgcgggcgcaggccgagcgtgcgggtgagtgcctgcgcggcgtccgccgatgaggtgaacgcggtcggcacgttgaccaccatcaccgcgtcattctcgttgtcggccagcagcgcttcgatggccgcggcatagcggtcaccatcggcgtcgaccacgatgtcgaccggattgctgcgcgaccagccctgtggcaatgccgcatcgagcttctgcaccgtgctgtcggacagggtggccagcgtgccacgcagcgcgatcagctggtccacggcaaggcggccgacgccgccaccattgctgagaatggccaggcggcggccagggaaggtgcccaggcgccccagtgattcggcggcggtgaacagctcgtccagcgcaccgacgcgcagcaggccggcgcggttgaaggccgcaccgtacacatcatcggcgcgggccagggcctgcacatgggtatcgcggctgcccggctgcacgcgctcggcgcggccggacttcaccaccaccaccggcttggcgcgggcggcggcacgcgcggccgacatgaacttgcgcgcgtccttgatctgctcgacgtagagcaggatggcgcgggtacggtagtcggtggcgaagtagtcgagcaggtcgccgaagtcgacgtccatcgtatcgcccagcgagaccacggcggagaacccgaccgagcgcgccacgccccattccaccagcgcggcggcaatggccgaggattcggagatcagcgcgaggtcgccggcctgcggaaaatgtgcggcgatgctggcattgagccgcgcgtgcggcgcgatcacgcccaggcaatgcggcccgaggatgcgcaggccatgcttgcgcgccaccgcctctacctgtgcagacaacgaaccggggccttcgcccaggtgcgcggtgaggatgatcgccgcctgcacgccacgttcggcggcagtgcgcaccacctgcggcacgatcgccgctggtgcggtgatcaccaccaggtcgggcacccagtccaggtccttcagccgcttgaccgtgcggatgccatcgatctcggcatgccgcggattgatccacgccaccttgccggggaagccggtgccacgcaggttgcgcatcaccgcgcgcccggccgaacgctcgcgcgggctgccgccgatcaccgcgagcgactgcggacggaacacggactgcaggtggtaggtactcatgcgcctacggtacccaaattccgtggcgatggggtcggaggcggggtcggatcccttttcgcaggaaagggctctgatcccctgctgcggatatccggggtcagagcccttcgctgcgcgaagggatccgaccccggcgtgcacgttttgttacagcagcgtgccgtgcaggatcatcgcggcgatgctgaagtagatcaccaggccggtcacatccaccagggtggccacgaacggggccgaggcgctggccgggtcgaagccgagccgcttcaggatgaagggcagcatcgagccggacagcgaaccgaaggtgacgatgcccaccagcgcggcgccgatggtgatcgccagcaggatccagtgctcgccgtagtcgtgcaggccgcccagctgccagatcacgatgcgcacgatggccaggcagccgaggatggcgcccagcaccatgccggtcggcacttcgcgcagggccaccttccaccagtcgcgcaggcgcagttcgcgcagtgccaggctgcggatcagcagcgaggtggcctgcgagccggaattgccacccgaactcatgatcaatgggatgaacagggtcagcaccaccgcgcgcgccagttcgtcctcgtagtgctgcatcgcgctggccgtcagcatctcgcccaggaacagcacgctcagccagccggcgcgcttgcgcagcatctcgaagaagccgatctgcatgtacggcttgtccagcgcttccatgccgccgaacttgtgcgcgtcctcggtggattcctcgatcagcgcatcgagcacgtcgtccacggtgacgatgccgagcatctgctgctgcgcgtcgaccaccggaatcgccagcaggtcgtggcggcggatcagccgtgccacctcttcctggtccatcagcgcatccactgttaccggcggattgacctgggccacgtccaggatcgattcctcgggcaggccggtgatcagccggcgcatggtcaccacctgctgcagctgctggctggccggctccagcacgtagatcgcgtacaccgtctcgcgggtgcgctcgacctggcggatgtgctgcagggtctgcgccacggtccagctggcgggcaccgccacgtactcggtggtcatcagtgcgccggcggtgttcggcgggtagctgagcagcttctggatgacctggcgggcgtcggtgcccagcagcgggatcaaccgcgcgcgctcttcctcatccagctcgtggacgatgtcggtggcgcggtcgtcggccatcaggccaagcagcgccgcagcccgcgcgggtggcagcgcggccaccagctcaccgctgcggtgcagctccggcgcttcgagcatcttcactgcacgcggcaacggcagcgcagccagcgtttccgcggcgcgggtcaggtccagcgtgttgaggaattccaccgcgtcggcggtgttgtagttcgccagcggtgcggccagtgcggcggcatcggccaccgggcgcagcaattgcttctggttcatcggttttgccttgtggggatgcgacctcgcgcaacgccaacgcaggcaaaccgtcccggtgtcaggcggtggccatcgctggcgtcgaacgaggtcgacttctactgtcgctggacatgggttggggactccgggatgcgtatgccaacggacgcgccgccagcggccggcagtctggacccgtgggccatgcaggtcaacctgggcgccccgcgctgggtggccgcccggccggttgttctcgtgcatacacaggccggcgcgcataatgtcgtggtggcgctcgccacgccctcccccatccgaacggacgcacagcgggctcccccgatgaccaggtattcccatgcatagcggtggtctggaactggccctggtgctgctgctggcggcggtcatcgccgtgccggtgttcaagaagttcggcttcggcgcggtactgggctacctggcggccggcgtggtgctgggcccggacgggctgggcttcgtgcaggacgccgaccgcatcctcggtgccgccgagatcggtgtggtgatgctgctgttcgtgatcggcctggagctgtcaccggcacgcctgaaggtgatgcggcgctcggtgttcggcgccggcgcggcgcaggtggcgttgtccgggctggtgctgggcggcctgctgctgctcgatcacttccagtggaagagcgcgctggtggtcggcgtggcgctggcgctgtcatccaccgcggtcggcctgcagctgctgtccgagcacaaggcgatcaacagcgaccatggccggctcgggttcgccatcctgctgttccaggacctgatcgcgatcccgctgctggcggccatcccgctgctgggcggagtgaagaacgagaccctgcgctgggaagatgcggccgtggcgctgggtgcgctggcggtggtgatcctgtgcggacgaccggtgctgcgcaaggtgttcagcatcattgcgcgcacccgcagcccggaagtattcactgccaccgccctgctggtggtgctgggcaccgcctggttcatgcaggaagccggcctcagccccagcctcggcgcgttcctggccggcgtgctgctgtccgattcggagttccggcatgagctggaagcgcagatcgaaccgttcaaggggctgctgctgggcctgttcttcatcgcagtgggcatgggcatcgacctggaccgcatcgccgccgagccgtggctgatcgccgcgggtgtcggcatcctgctggtggtcaagttcagcctgctctacgcggttggacgtgtcgcccggctcagctcgcggcaatcgctgctgctgggcagcgtgctgtggctgggcggcgagtttgccttcgtggtattcaacgaggcacagcgcgcgcacctgctgggcaacgccaaccacgaccggctggtggcgatcgtcggcctgtcgatggcgatcacgccgctgctgatgatcgcgctgctcaagctgctcggccaggaaaaagccgcaccacgcgcggcggccgaggccgacaaggtggcgccggacaaccggcccaaggtgctgatcgccggcatggggcgcttcggccaggtgatcgcgcgcctgctgaccgcgcagaaggtgccgttcgtggcgctggaggcgaacccggacaccgttgccgacctgcgccgcttcggcaaccagctgtactacggcgatccgacccggccggagatgctgcgtgcggcggggggcgagcacatcgatgtgttcgtgatcaccgtggatgacccggagaccaacctgcgcgcggtacgcatggtgcgccggctgtacccggacgcgacggtgctggcgcgtgcacgcaaccgccagcatgcgtggcgcctgatggacatgtcggccgagccgttccgcgaagtgttcggcaccagccttgagatgagcgggcgcgtgctgaccgcgctgggcgtggcgccggacgtggccgaacgccatgtgcagcgcttccgcgagcacgatgagcagctgctgcgcgaccagtatctggtgtacgacgacgaggcagcggtgatccagacctcgcgcgacgcacgcaacgacctgatgcatctgttcgaggccgacgcggaaagcgacggcaagtaggcgtgccgaccaacggtcggcagccaccgggggcacgatcggcacccaccgggggcaggattggcaccgacccgatcgatggcggacccggtagtgccggccgctggccggcagcctcggtatcccggaggtctcagcaggttgccggccagcggccggcactacccactgcggattccgatcccggtgctcaaccgttgtcgcgcaggaaccgcgccatcgacgaaacgcccggcacgcgcggttcgaactctccagcgacgtcgatgaagccgcgcatcaccgcgatctcgcgcgggctgcggttgaggctgtcgcgcacttccggatcggcaccggcgcgcaacaggcgctgcaccagcagcggcagtccatgcagggcggccagatgcagcgggccgaagccgcgcggatcgcgcacgtccaggctgacgtcctcatccagcaggcgctccaccgccgccatcaccacctgttcgtcgcaggcggtacccggctcggcgcgtgcgcccagcagcagcagcagcggcgtgaccgaaccggcggcggcctggtccggctcggcgcccgccaacagcagggtgtcgagcagggccagcaggcgcgagcggtcgcgggcactgaaaccgtacagcgcggcacagtgcagcgggcccagctgctccgcgtcaccggcatgcacgtcggcaccggcagtgagcaggcgcgcgacgatgtccggcaggcccagcgccgaggccagcatcagcacggtcaccccgcccggcaggcggtgttccagcttggcgccggcatcgagcagggccgaaacgatgtcgacctggcgcatgctgaccgccgccgacagcggcgtcgcaccgcttgcagcggcgtgctgcggatcggcaccgcgcgccagcagcaggtcggtcacggccaggtggccaccaccggccgcacgcagcagcgcggtgcagccctgtgcgtcgaccgcgtcgacggcaaatcccagatcgatcaggcggcgcacggcgtctacatcaccggccatcgcagcggccggcagatcggcctcgcgcagggtacggcgcggcagcggccacacccgccagtccagccagtcggccaggtcacggcgaccgatcgacagcgccacgcccagtggcgtctgaccgtcggcggcacgtgcttccggcgaggcaccgtgctgcaccagcagcttcagcgcgccttcgcgggccagggcggtggccagatgcagtgcggtcatgccatggctgtcgcgcgcttcgcgatcgacaccggccttgagcagggcctgctgcaggcgcagccagcccaggcgtaccgccagcgacagcggtgggtcaccggccggcgaagcggcgaacggatcggcgccacgctccagcaattccagcgccagttgttccaggccgcgggcggcctggtcgtgctgtgcgcaggcggccaggaagcgtgccagcccaccgcgcccggccggcgacaggccgcgctgcagaatgacctgcagcgccggcaccgcgtcgatgccgcgcgacagcagcgcgaacatcggcgtatcggcgcaggcgtcgcgcacatagggatcggcaccgtgggccagcagccaatcgaccgcgcgcggctccagggccagctccggatcgagcagcaggccgcccagttcttccggctggcacagcctggccagcgcggccatgccatcggtgttgccgaagcccagcgcttcgcgcagcagggtcagcggcggacggtccggcaacaggccgctggcgctggccgcttcaccgcgctcggccaggccatcactgacggctgccggcagcggataggacgggtccagcaaggccacgatcgcccagcggcccgcttcggccgcatagtccaccgcgcggcggccaaccgggtcggtggcgtcggcggcgatgcccagttccactaggcgcttgatcagcagcggcgagacatcctcggccatcactgccagctgcaccgcattgcggccttcgccgtccaccgcgaccaggtccggcttgtgcggcagcaggtgctcgaccacggctgcacggccggcacgggcggcttccagccacggcgtgcggcccagtgcatcgcgcgcttccaggttggcgccggcgcccagcagcacgccgatgatctccacgtggccggccagcgctgcctcgtgcagcgcgctgcggcgctggcgatcacgcgcgtcggcgcgtgccttgtgcttgagcagcagctgcacgccggccggatcgtcgtcctcggtggcggcggcggccagcagcaccggggtgccgtcggccggttcgctgcgtgcaccgcgctcgagcaggaagcgggccaggcgccagttgccgacctggcaggccaccgccagcggcgaccagccctcgcggttcagcgcatcgacttcggcagcggcatcgcgcagcagcgcggcaacgcccgggtcggaactgcgtgcggcatggtgcagcggggtgttgccatcgctgtcggtggcacgcgaatcggcgccgttggcgagcagggtcatcaccgcttcggggcggccatgccagctgtcgcgggtggcggccagcagcggggtcatgccccggtgcggcgcgttcacatcaacgccgcgggcaatcagctcgcgcagcaggcgcaggtccggcagcaccgccgccagcaccgccaggctgcgctggtcacgccagttcgggtccggcagcgcatacggatcagcaccggcctgcagcagctgcaggccacggtcgacgcggccctggcgcgcggcctcatacagggccggtgtcagttcctgcggcgccatcgcctccagcggcgcggtttcggccgcagcggggaacatcggttcctgttcgctgctggcagcggcgaacgggctggggcgcagcgacaccagcggcgcgggcgcgacccgctgcagcagcaggtgcagcgccggcgacagcagcacgaccgccagtgcggcgggccagcgtgcgccgtccggcaacaggcccggccaggccggcagcaccaccagtgcggccaaggcgatcaccagcgccgccacgccaagaccacgccaggcggtcaggtcgcggccggccagcgcctgccagtgctgggccaggctgccatccaggcgttcgacatcgttccacagcggccaggtgcgccaggccgccagcaggccggcactgaccagcacgctcaggcccagcaccgccgccaggctgccgctgtcacgcagggccgccagcggccaggccagcagcagcgccagcagcagtggcgcggcagcccacagcgccagcagtgcgggcaggtcctggcgtgcgaccaccttcagcggcagcagcgcacggctgcgacgccaccacgacacgcccagcgcgaacgccggctgcgccagtgcggcaaggatggcacccggcacaccgcccaccgcagcgcccaacgccagcatggcacccacggcgaaggcgatcgacagggcacgcggacgggaggtgtcagtcatagtgtcgcggcatcaggctggccaccgacggcggtacctgcaggtagaacccgcgttcgctcatttcgctgcggaccttttcaggatcggcctgggccaggcggcgctgggcatccagggccacctccaggacgaaggcgagcgtccccagcgaggtgagcagcggcgcgggcagcgcgctgaaatcatcgcgtcggggaacgtagacgtaggtgtccggcttgagttggcttttatagacgtaggcgtgcatgtccgcgggacgataacccgggaagagccatgattgtgtcggaaagccgacaccggggaaagccgtcagccgacgatggcggcgcgatcggcggcgtttcccttgcgaggttcagcaatgtggcggcgacgttcagccaacgccgccgccacgcgggcgcttacttgaccttggcgtaggtgcccttcagcgcgacaccggcgaggatggtgccggcgtagcactcgtaattggtgctgctcttgaactcgttcttcttgtagtagctgacgatgtcgaccacggcgttggcgccgcgcgacctggcgccgtcctgcagcgcgcgcagcgccgacagcgcgacccagcggcaggcctcggcatcgctcttgttggcggcgttggtcttcttgttggtcacgtcttcacccaggcgctgctgcacgctgaccggctggccggccaggtagaagcgcacgctgccgtcgatgccggcgtccttggcagcctgcgagctgaccagctcctgcagggactgctcgacgcgggtatcgcgggcagaggcggtggaggtcagggccagcagcgcggtggcagtggcgatcatgagagtgcggcgcatcgaaacttctccttgtcaggggtgcgggtggatggcggaaacagtgcggtggggcggtggatcactcgctccagcggcggaacaccagtgaggtgttgatgccgccgaaggcgaagttgttgctcatcacgtactcggcctgcagttcgcggccctgcccggtgatgaagtcgagctggccacagcgcgggtcgacctcggccaggttcagggtcggcgcgaaccagccggcgcgcatcatctggatgctcagccaggcctcgaacgcgccacaggcacccagcatgtggccgacatagctcttcagcgagctgatcggcacgcggttgccgaacacctgcgcggtcgcttgggtttcggcgatgtcaccgtggtcggtggcggtgccgtgggcgttgacgtagtcgatctgcgccgcgtccaggccggcatcctccagcgccaggcgcatggcctgggccatggtgtcggcgctgggctgggtgacgtgctggccatcgctgttggtgccgtagccgaccacctcggcaaggatggtggcgccgcgcgcctgcgcgtgctccaggtcttccaggatcagcgtgcaggcgccctcgcccaacaccaggccatcacggccggcatcgaacgggcgcggggtggtctgcggcgcatcgttgcgcacgctggtggcgaacagggtgtcgaacaccgccgctgcggtggcatcgagctgctcggcaccgccggccaccatcaccgtctgcttgccactgcggatcgcttcataggccgcacccacgccctggctgccggaggtgcaggcactggaggtggtgtacacgcgcccggacaggccgaagaacacgccgatgttgaccggcgcggtgtggctcatcatcttcaggtaggtggtggcactgatgccatcggtggtgaactcgttgagcatgcgcccgaattcaccggtggcctcgtggctgcccgaggacgagccgtaggccacgccggtacggccgctgcgcagcaccggatgctcgtgcaggccggcttcacgcagtgccacctcagtggcgcgcaccgacatgatcgcgaccttgcccatcgagcgggtggtcttgcggttgtagttcggcggcagctcgaaatcctgcgccggcgcggccagcttggtgttcagcccggcatagacatcccactcgggcatcgcacgcaccgcattgcggcagctgcgcaggtgtgcctcgatggtcggccagtcgtggccgagcggactgatggcggcggcaccggtgaccaccacgcgacgatcggcggccatcagatcatgcctccgttcaccgagatcacctggcgggtgatgtagccggccggctcggacagcaggaacgccaccgtggccgccacttcgtcgggacgaccgacgcggccggcgggaatcagcttgagcgcgtgttcaaccacttcatcgttgagcatttcggtctcgatcaggcccggggccacgcagttgacggtgatctggcggctggccagttccagcgccagggccttggtggcaccgatgatgccggccttggcggcgctgtaattgacctgcccgcggttgccggccagtccggacaccgacgacagggtgatgatgcggccaggcttgcgccggcgcaccatcggcatgatcagcggatgcagtacgttgtagaaaccgtccaggttggtgtggatgacctggtcccaatcctccgctgacagtgccgggaaggcaccgtcacgggcgatgccggcgttgcagaccacgccgtagtacgcgccgtgcgcttcgacatcggcctccagcacagcgcgtgcggcctcgcgatcagccacgtcgaacatcagtacgcgggcctgctggcccaacgcgtggatctcggccatcacggcctgtgcctcatccaggcggctgcggcaatgcaccaccacgtcgaagccgtcacgcgcgatgcgcagcgcgatggcccggccgatgccccggctggcgccggtcaccagcacgcttcgattccctgtcatgcctgtccactctccagataggccatcgcatcggccggttcgaacaccgacacgttggctgtcgcccattcgtcctcgcctgccaggatgcggcaggcgaacatccccaatccattgtcacccaacagctcgcagcgcgcctgtacgcgcagccgcgatccgctgggaaagctgctgcgcgggctgctgtagcggcggctgccaagcaggaagcccaactgcggcggctttcccgccgcacgcgcacggcaaccggcccaggccgcgatggcctgcgccatgtattcgatgccgacccacgccggcacccggccctcctcgacgaacaggcccgcgtcgggcaccaccagttcggcctcgatggtgtcctggtcccagtgcgtgatgcgctccagcaggcacatgtcctggcggtgcggcaccacctcttcgatcgcgtacagcgtgttcatcgacgctccagcgccagcacggcattgctgccgccgaaggcgaacgaattgctcagcacccgccgcggtgcctgtgccaggcgggtggccggtgcgaccagcggcagtgccggcagcgcggggtctgccacgccgtcccaccagtgcggtggcagctgctgctgcgggttcccggccagcacgatccagcacagtgcagcttcgatcgcgcctgaagcacccagcgtatggccggtcagcggcttggtcgaactggccggcacctggttgcccagcacctgcgacaccgccaggctttccatcgcatcgttgtggccggtggcggtgccatgcaggttcacgtagtccacttcatcggccgcccagccggcgcgctgcagcgcctgctgcagggcatcgatggcacccaggccctgcggatcgggggcggacatatggtgcgcgtcggccgattcgccccagccggccaggcataccgggccgggttcgcgggtgagcaggaacagcgcggcaccctcgccgatgttgatgccggcacggtgctgcgagaatggattgcagcgcagggccgacaccgattccagcgcgctgaagccggccacggtgaagcggcacagcgagtccgcgccacctgcgatcacggcgtcgacgataccggcccgaagcatgcgtgcagccgacatcagtgccttggcactggacgagcaggcggtggacagggtccacgccggcccctgagcaccgctgcgctggcgcacgaactgcgcggcagtacccatttcctgctgggcgtaatcgaacccgggcggccattggccctgttcggcatgggtgcgcagggcctgctcggattcaccgatgcccgaggtactggtgcccagcacgaccgccacgcgttcggcgccgtggcgggcgatcgcggcggccaccgccggtgcgatctgcgccagtgccacgtccagcagggcgttgttgcgcccgcgcagggcggccggcagttcttccagcgtcggcagcggtgtacgcacctgccccagcgccagggtgtgccccggcagcagggtatcgttgtcgctgagcccgcccggcacgccggcgaacatcgccgaagccaccgcgtcgcggccatcgccgagcgcgcagaccacgcccagatcgttcaggtagatcggtgcactcatcgatccggcccggccatgtcgatcgattcgatgcgcagcgcatagccttcggcgcggttgtccagctgcacgctgccatcgtccaggcgctgcagctgcagccacaccgtgccgtcgcgcgacaggctgcgctgatggccatcgtcacggacctgccagccggctggcagcgcggccgcgatggctgcggtcggccacagcgcgaactgcaggtcatccagcacgcgctcggcgcgcacctgcggcggcagccacggcgcgcgctgctgggtcagctgccggccgtcccactgcaggcgcacgccggtctggcccatcgcctgcaccgccagctgcacctgctgcgcatcggcttccagcagtgcatccaggtcgcgctcatgcgtgccgaaccggaaatgcaactgctgctgcaacgccagcggcgccggcaggctggccggcgacaggcgcagcggcggcagttccaccaacggcttcggcatgcggccggcgcaggccaccagcagcaggctcagcagcagtgctgtcgcaggggcgatcaggcgccgcacagctgctccagcacgcgcatgcggcggccactgtcatcggccacgtacgggttgttggtgtcccaggcgtaaccggccaggatggagctgatcatgtcgcgcacttcgggctgctgctgcgggtggtagatgatcttctggaaaccgccttcgtaccagctttcgacaaagcggcggaaggtcttcacgcccgcccgcagcgggaccgagaactccgcttcccagtccacggcttcgccggcatagcggcgcgccaggcatgcactggccagctgcgcggacttgaaggcgatggtcacgccggacgagaacaccgggtcgaggaactcgccggcattgcccagcagggcatagcccggcccccacaacgaactgacattggccgagtagccggtgatgcggcgcaccggcagcaccgcccattcggcattggccagcagccgggtcaggttcgggtcctcgccgacgatggcctgcagtttctgcaggtcgtcgccctcgtagcgctcgaagaacgacggttcggcgaccacgcccagcgagcagcagccgttggagaacgggattgtccagtaccagacgtcgacgtgctcgggatgggtggtgatcaggatcttgttgcggtcgaagtccgcttcggccggaatgttgtcgcgcacgtggcagaagatcgccccgcgcaccgggaagttggacggggattccagctgcagcaggcgcggcagcaggcgtgcgaagcccgaggcgtcgaggatgaaatcggcctcgatgcggtactcgctgccgtccgggcggcgcaccgtcaccgccggctgctcgccggcttcgaccgacagcacttcatcaccgaaacgcagcgtggcccccatgcgctcggcaccgcgcgccagcacgttgtcgaagtcggcgcgctgcacctggtaggtggtgccccagcccggcgagaacttcttcctgaagtcgaatgcggtacgcgcttcgccgtgcacgaaggccgcgccgttcttgtgctggaagccggcttcgaccacgtcctgcagcaggccggcggcctcgatgtactccatgctctgcggcagcaggctttcgccgatggagaagcgcgggaactgctggcgctccagcatcagcacctggcggccctgctggcgcagcatcgccgcagccacggagccggccgggccggcaccgatgatcaggatttcagtacgttcgacagcatccacagcagtattcatcggtgcgtccttgttgctcgatcaagtggaaagaaggaagtcggaagcaggctcaggcccgcggcagatcatgcggcggcggccggaacagcggcgagatcagccagaccaggccgatgccgaacagcagggtcaggccgaacgcgcgcagcgccggggtctgcgacagtcccagcaggccgaacgacagccaggtgctggccgcgcccacgcacaccgccagccaggcactggcatcgccgcggtgctcgatcaggaagatgccgtagtcgatgcccatgcccagcagcagcatcagtgccagcacgttgaacagctgcagtggctggccgaacaggcccagcaggcccagggtcaacgcaccggcaatcagggtcggcgcgaacacgcgccaggcctggcggcggtagcgcagccacagcgcgccgaacaccagcacgatgccgaccagcagcagcccccccatcagcttgcggtagtggcccagcagctgcgagaagtcggcggtgcggtccacccagcgcacgccgggcaggccttcggccgccccgcgcagggtcgccagcgcatcggcgcgcgacaggtcatcgaccatcaccacgctgatcatctgcccaccgacctcacccacccacaggtggcggaacggctgcgacgccggcgaggccaggaacgcctccgcggtcagcggcgtggtggcgaagtcggggcgcggcaagggttctccgaccgcatcggacacggcctgcagcacgcccggttccaccttggcggtcagcgccgcatcggcctgctggcgtgccggcgacggcagccagtcactgatcgcgcggtaaccgccgatgcgcttgtcgttggccagtacacgcaggcgttcggtcagtgcttcttcgcgctgcagcagctgtgcagcgtcactgccctgcaccagatagaactgcgccgggctgggcatgcccagcagctggctcaggcggatctgctgggccatcagtgccggcggtgaggactgcaggctgcgcaggtcgtcattgctgtgcaggcgggcgatgccgatggcagacagcgccagcgtgatcaccacgaacaccgtcaccggccggcggccatgcaaccgcgggaagcgctccagcgtgttgcccagccactgcgagaaacgggtctggcggatctcgccgccatccagccacgggaaccagaagatcaccgtgaggaaggcggcggccagaccgaccaccgagaacagcgccatctggcgcaggcccgggaacggggccaggcccagggccaggtaggccagcgcgctggtcagcaaggccagccacaggcccggcaacaggtgccgcagcagcttccagcggcgatcggccggctcggcttggcgcgaggcaaaccagtggatgccgtaatcctcggccacgcccaccagcgacgcaccgaacaccagggtgagcacgtgcaccttgccgaacaccagcacggtcaccgccagcgccacgccacaaccgatcagcaacgacgcggcgaccagcaggatcggccgcagcgaacggaacgccagccacaccagcagcagcaccgcggccagcgagccccagccgatcgtgttgatctcctggttggcctgcaccgcggccgcctcggcgtgcagcggcacgccggcatgcaggatttccagctccggcgctgccgccctggcagcccgcccggcacgttccagcaggccgtcgagatgacgctcaccgtcgagctggaacgccgaacccggtgtatcgaactgcagcacggcccagtgcctgccctcggcttcgagcaggccgtcatcgcccagccgcaaccccgaaccctgcgcctgctgctgccaccattgcggccacaacgacaacgggtcttgccgccagtcggtcaggcgcggagcgcccatcgggccgtacagcgcggccaacgcctgctcggccaacgcgcccggttcgctgccctgcagctgctcgcgctgggccggcgtcagcaggcggtcgcggtacggcgcgtagaacgcgcgcgcctcatcgaaccagccttcgatcgaaccactgggcaccagcagggctcggtcagtgtccttggccatggccgcggcaaaggccgcctgcgcacgcttggcggcagcgccgtccctgctgcccagcagcaccaccacctgccgcgaggtgccgtcggcgatgcgccgggtgacgtcgctcaacaggcggtcatgcgcatcctgcggcagcagcgcgaggatgtcggtgtcgatccgcgattgctggctccacaggtgccactgctgcgcgcccagtaccagcagcagcaacagccaggcgatgcccagccagtgccaccagcgccgcagccgctccggtgcgttcgatgcgacggcctcactcaaagcggcgtgcctcgtcggcggtgagcgtggccggcgcctcgctcaatgcactgaactggatctgcgtgcggtccttgttggcctcgacgatctcgacctggcgcacgtagcggtcaccctgcagggtcagcgactggaacgccttggccagcatcgccgacttcggcgtcagccgcagccgccagccctgcccttcacggctggccgccacgttgaactggctggacagcgcctgcacgtcgccactcatcagcgcgaacatgatcgcgttcaccgaacgcatcgccggctgctgccgtgcatcgagttcgacacgggtgctgccatcgcgctggcggctcaggatgcggtcggcggtgaccaccacttcggaagggaacggcttgagcgtggcccagatcacgccgtgctggcgcgcgaccacgaactggccctgcgagcgcagcgggttcctgaagccgctgacctgcttttcctggctgaactggccacgcagcacgtccggccgcgccaccgcctgggtgatcgcatcgatggcggggtcggccgcctgcacctgcggtgcggcaacgaagatcagcgcgcacagcagcacactcgaaagacggacaagggggttcacggcgcaggtactcccaggcgttcccacagtaccggcgggcactggtacagcatttccttgctggccgcgtccaccgcgacctggatggtcatcgcgcgggtcagcacctggccgctctgcgcatcgaggatttcatactcgatcttcagccggttctcccattccacgatgcgcgcgaccacgcgcagcgcctggttgaacagcagcggccgcacgtacttcacccgcgcatcgaccaccggccacaggtagcccgattcgagcatctgcgggtagtcgtagtcgtagcgcccgagcagcgcgcagcgcgcgatctcgaagtacttgaaatagttgccatgccagaccacgttcatcggatcgcagtcatggaaggcaggggtcaacgcaatttcgccaacccgttcgatggcctcattcaccggcatacagctcccaacgttgcgcgcggatctccaccagcagttcccgcagttcgcgatccagcgcgcggtcttcttcaaccagggcgatgcgctgccccaggtcggcgtacatgtcggccagactgccatgcagctgcgcgttcaggccaacccgttcgcgcagcgccaggccctggcgggcggcgatcagcatcgcggccaccacctgttcagtcagctcgatcacgcgcaggcagtcgcgcgcggcgatggtgcccatgctgaccttgtcttggttgtggcactcggtggaacgcgagaacacgctggccggcatggtctgcttcagcgcttcggcagtccaggccgacacgctgatctgcagcgccttcaggccatggttgatggccgcgcgcgcgccggtggccgccgacaggttggccggcaggccgtggttgtagcgggtatccaccaccagcgccagctgccggtcgagcaggtcggcaacgttggccacggtgttcttcagggtgtccatcgccagtgcgatgtggccgccgtagaagtggccgccatgcaggatgcgctcgccgttggcgtcgatcagcgggttgtcgttggcactgttcagttcggtttcgatcagctggcgcaggaacggcaggctgtcttccagcacgccgatgacgtgcggcgcgcagcgcaatgagtagcggtcctgcaggcgctgttcgttgcgcggcgggcgttcgctatgcaggtcgctgcgcaggcgcgcagcgatgcggccctggcccgggtgcggcttggcggcaaacagggtttcgtcgaagtggtgcgcgttgccgtcgctggccagcacgttgaacgcggtcaaccgcgtggccatgcgcgccaggtaatcggcgcgctgccaggccaggcaggccaggccggtcatcaccgcggtgccgttcatgatcgccaggccttccttcggccgcagcttcagcggggtcatgccgatcttcgccagcacttcggccgccggctgcacgcggccgtcatgcagcacctcgcgctcgccgcacagcaccgccgccacgtacgacagcggggtcaggtcgccgctggcaccgaccgagccttcggccgggatcatcggcagcacgtcgtgctgcagcagcgtggccaggccttccagcagcggcacgctgacgccggacatgccgcgcaccagcgacgccaggcgcgcggccagcaccgcgcgggtctcgaccgggtccaggtaacggcccaggccgcagccgtggtaggtgtacaggtggtgcggcagttccgccaccagcgccggcgggatgttcaccgtgcacgagtcgccgtagccggtggtcacgccgtagatcacgccgtcctcgcgcagcaggcggtcgaggaagtcggcaccgcgctggatgtgcgcgcggaacgccggcgcgtcgctcagtgcggcctcgcactggcgctgggccagggcaaccacgtcttcgatggtcaacggtgcgtcgccaaagcggcacacgggtacggcgtcagtcgtcatgcggagcctgatcccagaaggggaagaaattgaaccagtccaacggggactggatgacctggagttccagccagcgcgcgaagcgctgtgcctgttcggccagcgcggcgtcgcgcgagccacgcggcagcacgatgcgttcggcgaactgttcgaatgccacccgatagccgtcgccctcgtgcaggcaggccatggtgtagaccgggcagcccagcgccgcggcgagcacataggcgccgatcgggaacggcgcgcggtggcccaggaaatcggcagtgacgctgcggccaccctgtaccggcgtgcggtcgccgacgatggcaacgaagccccccgccgccacgcgctcggccagcatcaccgcggtggccggccccatttcggtcacctgcaccagttccaccgccgccagcgggtccagccgctgcagcaggcggttgaagcgctgcgcatgcgcggtgtgcaccagcacggtgatgcggaaccccggcacctgttcggccagcacctggcacagctccaggcagccgatgtgcgcggtgaggatcagtccgccctcgcggcgcgcgatcttctgcagcaccaggtcacgatgcaggtggatgcgctcggccgggtagcgcccgcccaggccgaggatcttgtccagcatcgtatcggcgaaggcgaagaagtggcgcaggctgtcacgccgtgtcggcgcgcggccgagcacgccgctgtgcgcctgcagccgctgcaggtactgcatcgaagcctggcgccctatacggttgcccagccaatggcaggccaccaccggccacacgcacaggcggaacggccagcgcccgaaccagcggtgcacccagcacaggaacagcacgccggccaccgacgtcgattcgccgatgtcggcccagtgcggggcaccctgcgcggccgccatctcagcgctgcccccgcaggcggcgccacagcagccgcggcgcacgccagagcatgccgaagaacaggcgggtatgcatgcggctgatgcgcacgttgtcgcgccacacatcgaagtgcgacacgccatcggatggataggtcacacgcgtggccaggtgctcgaccggcaattgccgccagtacagccgcaccatcacttcggtatcgaaatccatgcgccggccgatggtctcttcaccgatcaggcgcagtaccggcggcagcggatacacgcggaagccacacatggtgtcgcgcaggtgcagcgacagcgtgttgatccagacccagatgtgggtggcgtagcggccatacaggcgcgccttgggaacactggcgtcgtaagccggaatgccgcagatcaccgcctcgggatgggcgcgcgcggcttcgatgaagcgtggcaggtcagtggtatcgtgctggccgtcggcatcgatctgcagcacgtggctgtagccacgcgcgccggcctcggcaaagccggccagcatcgccccgcccttgccctggttgacgtccaggcgcagcaggtcgacgccctggcgctgtgccagcgcgcgcagcaccgccgcgcacccatcgtgcgaaccatcgtcgaccagcaggcagggcagtcccgcggcctgcacgccatcgaccaccgccgcgatggcgtgctcgtggtcgtagacggggatcaccaccagtggcgcgaatgcggcaccggcaacggccgggtcagtccgcatcagcgaaaaccaccctgccgctggcatgcacaccgtggctggaggtgtagcggaaggccagcacgttgcgtgcggcatcccagtccagctgcagggtcaactcgtcaccggggcgggccacgtgctggaatttcaccgcatccatgcgcacgaacgcgcccggcatcacaaacgcctggcgggcgaagcgcaccgcccagtccagctgcgccacgccgggcaggattgccgcctgcgggaagtggccctggaacggccgcagcgccgggtccagggtcatgcgcagggtggcgctggcggcatcgcggtgatcccacgccggcaccggcatcaacggctggaacagcgccgccagcgcggcctgggtcaccttgccctgcgcattgatcggcagcgcctgcaccaggcgccagcgacgcggccgggtcactgcgtcatgcgcatgcgccaggcgggcgccaaggcgctggcccagcgcccgccgcgcagcgtcgccgccctccagcagcgccggatcggccggcaccaccacggcggccagctgctcgcgctgcccgggcagcaccagcacgcgcgcgtcatccacctcggcgtcttcgcgcagcgcgcgttccagcgcatccagcgacacccggcgttcctcgatcttgacgatgcggtcggcccggcccagcaggcggaagcggccgtcggccagggcttcgacacggtcctgggtgcgccaccaaccgggggtgtccaggtgcgccgaggccaccgccaggcagccatcgtcgatgcgcctctgcacgcccggcagcggctgccacggcggcaggtcgatgtcccagcggcgccaggcgatgccgccggtctcgctgctgccatagacctcggtcggggccacgcccagccactgccgcacctgccgcgctgcgtcttccggcagcggaccaccggaggagaacaccgcgcgcaggcggccatgcaggctggcccagtcgagctgcccgggcaggcgcttgaggtgggccggcgtcgccaccagcaccgtatcggtaccggccagcgcacccaccaggtcttcgtggaagaaccggcgcggatgaatcagacggccggcggccagcggccacagcacgcggaacagcagcccgtagatgtgctggtgggacaccgtgccatggacctgcacaccctccatctgcgcaccgaacgcggcctgcagcgcctccacctcgcgcgccagctggtccaggcgcttgccgatcgcactgggctggccggtgctgccggaggtgaacacgcacagctcgcaggcgcgctcgtccagcgcctgcagctcatcgtccagcgcggcgtccagcgccaccagcgagcggtagtcggcggacacgtcgcctgcgaagccgctcacctgcggctgcagcgcctgcagcgtggctggcaggttgtcggcggccaggaacacccgcttgccggcatgccaggcaccgaacagcgcggcggcaaaggccacggcatcatcgaagtacagggcccagtcgcggccttcggcggccgcaaaggcggcgcgccaggccagtacgcgctggcggaagccggcatggtcgatcacctcgccgtcgcacaggccgacgctgcgctgcggccgtgcctccagcagcagccggtccagggcaatccactcagccatgcgcgtgcgccgccttcacctgccgccgcaccagccactcccctgcgaacaacacgcccatcatcacgtacgccaacaatccgttgtagagcatccagacccggtccgacgcgtacagcgcggtcagcagggccaggctgccgttgagaacgaagaagccgcaccacacctgggtgacgcggcgggtataggccaccgcgaacggcggcaggtccggctcctgcagccgcgccaggcgctccaccagcggcggcccgaagcgcaggctggtgccgaacaccgccagcatcaccacgttgaccagcgccgggtacagcttcagcggcagggcctggttgagcacggtggccagcaccgccagcaggccggtgccagcggcggcggcccaccacagcggctgtcgcgtgctcagtgcacgcagcagggccagggtgaacagcagcagcgacaaccagcgcggctcgaaacggcccatcgccaggtacaccagcagcgggtaggcaagcgaaatccctgccaccacgacggtacgtgcgcgagccatggcgacgccgccggcgctgcggtcaggcggctgcctggtccggcagcagtccatgcacgacatcgacgatgtcctgcacggtgcgcacggccttgaacgcttccggctgcagattgcggccgagcagcggcttgagctgcacgatcaagtcgaccgcatcgatgctgtcgatgtccaggtcgtcgtacaggcgggcctcgggggtgatccgggcggtttcgatctcgaagctgtcggtcaggatgctgacgatgcgttcgaacagttcattcttggtcatggcaattcctggcgccgttacgactggcgggcggcgacgaactcgccgagcgcgcgcacgctggagaaatggcgacgggtttcttccgaatcggccgagaggctgacaccgtacttcttctgcagcgccaggcccagttccagcgcgtcgatcgaatccaggccgaggccctcgacgaacagcggcgcggtcggatcgatgtcctccggcgtgatgtcctccagcgaaagggaggaaatgatcaattccttgatctcgtgctcaagtgcttgcacggggcggatctccagacaggtcgaaataacgagaaaggtgctcggtgacgcggcgtgctgccaaggcatccccccttggcgagtcgtcatcggccaggaagggcgcgatcgggatatcttcgccgatctgcagccgaacgtgaaagcgacgtgaggggacacgataccacttctgtcccttggtcaacgtgggcggggtgcaggtgatccgtaccggggtgatgtccagccggccgcggacggcgatgttggcggccccgcgctgcagccgcggcggttggcccggcacgctgcgggtgccctccgggaagatcaccagggtaccgccggcatgcaccgccgctacgcagtcgtcgaccaggccggccccgtcatcgttggcgatgtagccggccgcccgcaccgggccgcgcatgaacgggttgcaggccacggcccgcttcaccacgcaatcggcgttgggcagcagcgaaatcaggcagaccacgtcgatcagggtcgggtgattggccagaaccagcaaaccgtcgcgctgcaggcgttccccgccctcgatctggtaggtcatcacccccagcgcacgcatcaggcgcaggtggctggcaaaggcgacctggaccacgcggcgggcccggcggcggcggaccaccgggtcgcgcatcagcagcaacaccggcatcaccagcacgcccagcagcaggccgcccacgccaaatgcggcgaagctcaggccggtgccgaacacccgccaggcatgatcgaggcggcgcagcgcctcagccacggcgtccccagcgccagcgctggccctgggccacgtgctccagcgccggcgcgccagacagcaggaagcggtgcaggtccagcgcgtgcggcagcgtgcccggggcggtggcggtggcctccggcgccgcctcccattgcagcgagagcgtcggctggcccgctgtcggcgcggtcaaacgccagcaccaggcaaagaacgggtcgggttcgtcggcaaacgtcgcgtaaatttcaggaagcggcgactcatagaccaccacccgcacttcgcgggcaccatcggccagcagcccggcggcctccaggcaggcggtctcgaccgtggcctggccggcggccagcgccaggtagttgccgcggtggccgcgggcgatcgagtacagcgccgcgatcgcgttgtgcaccgacaggccgaacccggtgggggacaggggctgatcgctggccagcgcccccagcaggtccatcgaacgggccacgtcgccgtggcggctggcgaacaccagcggcacctggctgtcagcgccctgcccgtcctcgcaccagcaggcagcctggatcgccatccggcccagccgctcgatgcggcggcgctgcatcgccgggatctcggccaacgccggcgtgtcttcgccctgcggcggatacggcgcatcggcccagcccagccactggctacgctcgctcaggccgggcgcccaggcggcccagtcgacgatggagaattcgatcatttagcgatggtgcttcaacgggagaacgataggcacgagccattacggcgacgcgcggcggccccccaattcctgcagccgtgcgtccgtccaggacgtcgccggctgcccccctggccgccggaaaggagcgcacgctagcacgtcctgcgcggggtgtgcaggtttcacattccccaacgcgggggccggcaccggccggccccgcattcaaacgatcagtggtaaccggtgtcggcgtgcaccttgccgcggaacacccggtacgaccacgccgtgtagccgaggatgaccggcagcagaatgaccagcccgaccagggtgaagcccagcgaggaggccggcgcggcggcctgccacagggtcatcgacggcggcagcaggtagggccacatgcccagcaccaggccaaggaagccgagcacgaacagggccaggctgagcaggaacggcggcaggtcgcggcgcggatgggtcgcgctgcgccacagcgcggccgccaccgccagggtcagcagcgggaccggcgacagccaccagaagttgccgtcgctgaaccagcggtccatcaaccgcgaatcgaggaacggcagccagctgctcaccaggcccatcgccgcgatcaccgccaccaccagcgggcgggtcatctgccgcgccagcgcctgcacgcgcccttccgtcttcaggatcagccaggtgctgcccagcagcgcatagccggccaccagcgcggcaccggtcagcatcgcaaacgggctgaaccaggcgaacgcgccgccctggtaggcaccgtccaccagcgggatgccctgcaccagcgtgcccaggatcacgccctgggcaaaggtggccagcagcgagcccaggccgaaccccacgctccacaggcggcgcgaacgatgtgccttgaagcggaactcgaacgccacgccgcggaacaccagcgccaccaccagcagcagcaccggcaggtacagcgccgacaacagcaccgcataggctttcgggaacgccgccagcagcccggcgccgcccagtaccagccaggtctcgttgccgtcccagatcggcgcggcggtgttcatcatcaggtccagctgctcctcgtcctcggcgaacggggccaggatgccgatgccgagcacgaagccgtccagcaccacgtacatcagcacgccgaagccgatcaccgccaaccacgccaccggcagccaggtcatcaggtccatgtcagcgctcctccagcggttcgtcggccgccgacagcgggcgtgccggcgtatggctgccatggtccagcgacggcccctcggcgtacggctgcggcccgtggcgcaggatcttcaccaggtaccagataccccagccgaacacgaaggcatagccaaccacatagacgcccagcgacagcgcggtcatccacgcactctgcgggcccaccgcatcagcggtgcgcagtacgccatacaccacccacggctggcgccccatctcggtaacgaaccaacccgacagcagcgcgatgaaaccgctgggcagcatccagttccagccgcgcagcagccacggcgaatccagcagcttgttccgccacagctggaaggccgacacccaggccagcagcagcatcagcgtgcccagcccgaccatgatgcggaaggcgaagaacaccggcgtcaccggcggccgttcgctggcgggtaccgaggtcagcgggtcgaaggtgccgtccaggctgtgggtgaggatcacgctgcccagcttcgggatggccacttcgaaatcgttgcgctcttccttctcgttcggcagcgcgaacaccaccagcggcacgccctcgccttcctcggtttcatgccagtgcgcttccatcgccgcgatcttcatcggctggtgcttgagcgtgttcaggccatgcatgtcgccgacgaagatctgcaccggcacggtcagtgcggcgaacgccaccgccgcgatcagcatgcgccggcccgcttccacgtgcgtgcccctgcgcaggtaccacgcaccgacgccaccaatcacgaaacaggtggtgatgaacgagcccagcgccatgtgcgccaggcggtacgggaacgaggggttgaacaccacctgccaccagtccaccggatgcacgatgccgttgaccatctcgtagccggcaggcgtatgcagccagctgttggacgacaggatccagaacgtggagaacaacgtgcccagcgccaccatgcaggtggacaggaaatgcaggcgcggcgagacccggccccagccgaacatcatcacgccgaggaagctggcttccaggaagaacgcggtcagcacctcgtaggtcagcagcgggccgatgaccgtaccggccacctcgctcagccgcggccagttggtgccgaactggaaggccatgacgatgccgctgaccacgcccatgccgaacgacaccgcgaagatcttctgccagaagaaatacagctcgcgccacacgggcaacttcgtgcgcagccagcgccattcgatgaaggccagccagctggccgtgccgatggtgaaggccgggaacagcacgtggaaactgatgacgaatccgaactggatccgggacaacaacaacgcgtccaagggacgcctcctgcctgcgaccggtgggataccggaccactttaggaggatttcgttaaggtgggatgcgaccgggtgacgcgctgcttcactttgtcgcaggggtcaaccgttctggtagctgccagccttggttggcacacacgcccaaacgccgacccaggtcggcatctaccaacggcgactggaacggcccaccgcccggagggcgcctcagagccagaaataccaggccgctgcagccagcagcgcgccaaacaacagcacctgcaccaccacatagcccacgccaccgtcgcgcgactcagcggcaatgcgcttctgcagcgcctcgctcacatccggcgttgcttcctgctgcgcctgctcgcgcaacgcctgtgccagcacgcgcgcttccgcatcgcgaggatcggtgggtgggttcacagcagctctccggcagtggcatgccgcgtcagttcctgcttcaggacctggcgcgcgcggtgcaggtggctcttgatggtaccgcgtgccagtccggtcacctgctcgatctcggccagatcgaaatcctccaggtaatgcaggccgacgatcaggcgctgcggcgcgctcagccgttccagtgccgcgccgagctggcgcccggcctgcagcgcctcgctcaactcggcgggcccggggccttcatcgccgatccccagttcctccggcacctccaccgccaccatccattgcgcctccagccgccgccggcgcaggtgctgtagtgcagtggtgtaggccacccgcgaaacccaggtacgcaacgaagattcaaagcggaaccggtgcagctggcggaacacggccaggaaggtttcctgcagcaggtcagccacctggtcgcggtcgcccaccatgcgtccgatcacatgcgcgcaggtgcgctggtgggcttcaaccagttgcgcgaaggccgactgcgagccatcgatgatggcccgcaccagggcctggtccgcgtccagcgctttggcgggcgccgccgtcgccgccgtatcctcgcggcgacggccccgcagtgccgacagcgcttcgccgagcaggctcatgcgcggggcgccccctgtgcccgtggcatgcgccggctcagcccttgcgtgcggcaggacgggtgaagtgccaggccagcagctggcccaggccggcactgccgaccagcgcggcagcggcaccgaaggtcaggtcacgcgcaccgatggcctccagcagggccatggccagggccaggcagaccaggctgatgccccagcgcaacgccccctggcggcgccgctcttcttccagcacggccagcgagcggatcacttcctccggcacgtgcggggccaccagcttgctgcgcgcgcgcgcatcggcaatggcatggatcgcgtaggcgatgcagatgaagagggtgatcgggatcagttcctgcatggtcgggctcctgttcgatggatgatgcgggttcaggagaatggatgcgcgaccacggcaaccggttgcactagctgcctgccacctcgtcgctggcgccgggcgtgtccgccgggtccgggaaataggtctccacctggaaacccagctgcaggtccgccaacagtcgcagcaactgctgatccagcacaaaacccgcccatgcggtctttccaaagatgccgacacgcacgccgatcgaagccccctcctgcagcagttccccgatcacatcggcgcgtgcccgcaggagatcgaccaacgccggccaggcatccatcagccagccgtccttgcccctctccagtacgaacaccacgcgggtctccgcatgcccgctgatcaggctgccgtcgcgatcccggtatccggttccgacgtctcgggaaaacgccggttccagatccaaccgggcggcaatcccggcgccggcctctgttgggtgctgcacgcgcagcgagatcctgtagtcgtagcagtacatatcggttccatccgaacggaatggccatcatgccgcacacgccgtcgcagcgacctggagggggccattttgccgattccgctgccatgacctgtggcccctgccccgggcccgtgcggctgctacgcttgcccggtttcctctactggtgccgtccgcccatgtcccgagtgctgcccctgtccctcctgctgtcggccgtgctggccgcaccggctgcgcatgccgcgccgacgccgatcaccatcgaacaggccatggccgacccggactggatcggtccgccggtcgagaaggcctggtggtcgtggaacagccagcaggtggagtaccagctcaagcgcaacggcagcccggtacgcgataccttccgccagccggtagccggtggcgtggccgcgcaggtggccgatgaccagcgcggcaccctggacgtggccgagccggtctacgaccgcagccgcagccgcagcgccttcgtgcgcaatggcgatgtgttcgtgcgcgacctgcgcagcggcgcgctgacccagctcacccgcagcaacgagcgcgcgggcaacgtgaactttgccgccgacaacggcgtgatctggcgcgtcggccagaactggttccactggaccgccgccagcggcgtgcagcaggtggccagcctgaaagccgagaaggacccgcgtacgccgccgaaggccgacgtgctgcgcgaccagcagctgcgcacgctggaaaccctgcgccgcgaccgcgagcagcgcgaggcattgaaggaccaggaccagcgctggcgccaggccgacccgacccgtgcgccgggcccggtctacctgggcgccgacgtcgagatcggtgacagcgtgctgtcgccggacctgacccacctgatcgtggtgaccaagccgaaggacttcgacgacggccgcaccagcaagatgccgctgtacgtgaccgaatcgggctacgaggaaaccgaggacacccgcacccgcgtcggccgcaacggcttcgagccacacaccctgtggtacgtggacgtgcgcaccggcaaggccgagaaagtctcgctgtccagcctgccgggcatcagcaccgacccgctggccgagctgcgccgcaaggccggcaaggatgcgctgaagggcgagcgcagcgtgcaggtgatgagcgacttcatgggcggcggcatccgctggagcgccgacggccagcaggccgcggtgatgctgcgtgccaacgacaacaaggaccgctggatcatcagcgtcaacgccgccgacggccgcgtgcagaaccgccaccgcctgaccgacaacgcctggatcaactggggcttcaacgatttcggctggatggccgatggccgcacgctgtggctgctgtccgaggaatcgggcttctcgcacctgtacacccaggccggcaccgccaagccgcaggcgctgaccagcggcaagtgggaaacctcggcaccggtgccgtcggccgatggcaagggcttctacttcctgtgcaaccagcaggcgccgcatgactacgaagtctgcgcggtcgacaccggcaaccgccaggtgcgcgagctgaccagcctcaacggcgtggaggatttctcgctgtcgccggacggccagcagctgctggtgcgctactccggtgcctacctgccgccgcagctggcggtgctgcccagcaccggcggccaggcacgcgtgctgaccgatacccgcaccgccgactacaaggcacgccagtggatccagccgaagctggtcgcggtaccgtccaggcacggtgcgggcgtggtctgggccaagtactacgggccggaaagcaaggaaccggggaagaagtacccgatcgtgatgttcgtgcacggcgccggctacctgcagaacgtgcaccagcgctacccggcctacttccgcgagcagatgttccacaacctgctggtgcagaagggctacatcgtgctggacatggattaccgcggcagcgagggctacggccgcgactggcgcacggccatctaccgcaacatgggccacccggaacttgaagactacaaggatggcctggactggctggtcgacacccagcagggcgaccgtgaccacgccggcatctacggcggctcctacggcggcttcatgaccttcatggcgctgttccgtgcaccgggcacgttcaaggccggcgccgcgctgcgcccggtggtcgactggcacaactacaaccacggctacaccagcaacatcctcaacaccccggacatcgatccggaggcgtaccgcgtgtcctcgccgatcgagtacgcgcagaacctgcaggacaacctgctgatcgcccacggcatgatggatgacaacgtgttcttccaggactcggtgaacctgacccagcgcctgatcgaactgcacaaggacaactggtcgatcgcaccgtacccgctggaacgccacggctacgtgcgtgccgattcctggctggaccacaagcgcatcctcaagctgttcgagcagaacctgaagtgagcaacgccgcggccacgatccggatcgtggccgcggtcatcctggatgaccgcggccgggcgctgctggtgcgcaagcacggtgcccgccgcttcatccagcccggtggcaagcccgaacccggcgaagcaccgctgcaggcgctggcccgcgaactgcacgaggaactgggcgtgcagctgtgcaccggtgccgccatcgcactgggcacgttcgaggactgggcagtgaacgagcccggccaccgcgtgcaggcccaggcctggtgggtgcaggtggacggtacgccacaggcgtgcgccgaaattgccgaactggcctgggtgccgctgcaaccaccgcatggcctgcccttggcacccttgagcgaacaccatatcctgccggcggtcgccacccgggtgacggcccgctgagcaggcgggcgccgactgcaaggacatcggatgtcagtgccgctcccgccgcttcccacccgcaccacgccacccgctcacgcctgggtgcgcccgatggcgcaggcgtcgttctggctgtgcctgctgctgacgctctacttcgtgctgcaggcgctgctgttgtggccactgcacggcaccccgctgtggcagtcgctcgccggaatggcgcaggcgcaccgggtgcacagcgtcacctggctgctggcccacccggtgggcgcctcgatgatcatcgcgctggcctgcctggtctcgaccgcagccagctggggcctgctgcgcgaacgccgctggggcctgtggggcttcgtggcgctgttgctgctgagcgcactggccaacttcgcgatcgcctggtggctggacgcgtgcatgcgcgatctcatcgcactgctggccgatgacccggccctgcagcaggagctgcagccgcggcgctggatggtcaccttcatcgtggtcggtacctcgatcctgttcctcggcctgcagggctggctggcctggcgcctgttgaggccggacatccgctcgcgcttccgctgagccccatccgattcccgctggacaaggaccgtcgcatgcgcgtgctgaccctgctccccgcactgctgctgttcgccgcgcaacctgcgtccgccgacgcgttgcgatgtggcgagtaccgcagcaccgagggcgccatggcgctggtgttcgaatcatccgctgccggttatcgcgctctggaaggccaggaacacgcgcctgtgcgcatcgaccgcagcggcggcgatctgcgcctggtatttctcgacgacggtgtatccaccgccatcagcgtggctgctgacggggcgcatatcaacgacggcatgaccgacttcgagttgcatcgaccccaggcctgccagcgcgcccctgcgcccgtcaccgacggctgcctgggccaacctgcgctgtgcattgcgcggctcgcggatgcgccgccggaacaggcgcaacgcgcgtgcgaggaaagcgtcggcgccgggtgctcggcgctgttgcgccactttctcgctgcacccgccgccgcagccgggcagcaggacgcgccattgcctgccgcgcagcgcaccacgctgcagcggctctgcctgcaccagcgcggtggtcgcttctgcaccgaggttgccgagcagcagttgatcgcgctggaacccgcgttggccgtgcaggcgctgcaggtggtctgcgatgctgggcgcgccagtgcctgcgaacgtgttgcgccattgcgtgaactcggcaccgatctacgcctcgtgcctctccagcaagtgccctgtggccgctatcaggccgatggcggcgcgatcgacaggctcgacttcggcgatggcacgcgcggccgactggaagacggcgccatccaccttcagcaggacggcgaaacccttgtcctgcgccagctgggcaacggcgacctgcttggcatggatacgcagaccggttaccagcgctaccagccggtgcccggcacggcacaatgcacgcccccgcgcgagggccgtggttcgccgtagcgcctggagtttcccgttcgatcgtcaaggagacgacatgcattcacccgcatcgcgccgccgctggctggcctgggcgctgctgctggccgcgccgatggccgccgcacagtcaccgcaatgcggcctgttcaaggccgacgaaggcagcggcacgctgcgcatcagctcaccgaaccgcggcgagcagaagcacttcggcagtgcgccgtctccggtcgcgttccagcagatcgacggaaagctgcaactggtgaacctggagtacggcctgcccagcgcgttgcaggtgcgcgatcgtggccgcacggtcgaggtggatggcacggtctacatcctgcaggcccccgcacagtgcgccgccgcagccaggccggctgaaggcagctgcctggccgatgcggcggcgtgcctggacaaccgccgtgaagcgcccccggccgcgctggaagcagggtgccgggaaggcgtgcccggcatgtgcctgcagctggccgatcgctggcatgacgaggccagggcgccggccacgccggatgaggcgcagcaacaggccatcctcgataccgcactggccggcatcgaactgcctgtgccgtgccggaatggcggcttcagcaacgagacaccggcctgtgcagcggcgctggaagcggatccggcgctgcaggatcagatcgtcaaggccgcgatgggtgcggcgatggtcgaagccgtgagctccgtgctgtcaccctccacgccggtggtggtgccggccgcgcagcgccagcagctgttgcagttgtgccagcaggtcggccatggcggcttctgcagccgcgtggccgagctctcgtgggaatccggcgaccccttgcaggcggtgcaggcactgaccacagcgtgcgcgcccggtaaggaaagcgccgcctgcgagcgcctgcctgcattgcaggcgctgggcgcctcgttgcggccgcagccggctacggcgctgccctgcggcaccttccgcgccgcaggtggcctgatggatacgctggacttcggcgatgcaggacgggtcggcatcggctgggacagccaactgcgtgctcgtgtcgaagacggcgacatccgcatccgccacgacaagggcggcgacttcgtgctgcggccgttgcccgggggccagctgctgggcctggacacgtggacacgcttccaggtgttcgtgccgaccggcgagggcgcgagcacctgcagcccgccgaaacactacacggtgctgccgctgccgcaggactgcccgcaggcgctggccagcggcggtgccgaagcctgctgcgcgcagggtaagctgcagggctgcaacattcttggcaaccgtcttgcgctgtccggccagtggcggcaggcggcagagcactacaccaccgtgtgccgtgccggcgtgcgcgagggctgcgaaaacctggtcgcagcgcagggccgcagcagcgacatcgacgcccatgcgacgctggagcggctgtgtgccgccgaccgcagcgggcgccacgtcgcctgcgacgtgctggacaccggaaactggagcgccctggagctgggccgtgtcctgcaggaggcggtggacgaagcgacggccgaggacactccggcgccgcgcgcttccaaccgcaagcgatgagccggccaaggcctgcccgcagcttcgggcgggccctgcggtaaagtagcgccatgaacgaattcgagcgcgtgcgcacctacctcaccgacctgcaggaccgcatctgtgcggcgatcgaggccgtcgatggccaggcccgcttccaggaagacctgtggcagcgggccgagggcggtggcgggcgtacccgcgtgctgcgcgacggcgcggtgttcgagcaggccggcatcggcttctccgatgtggccggcagccgcctgccgccgtcggcctcggccaaccgcccggaactggccggcgcctcctggcgcgccaccggcgtgtcgctggtgttccacccgctcaatccctacgtgccgaccacccatgccaacgtgcgcttcttccaggcgcagcgcgacggcgaagtggtggccagctggttcggcggcggcttcgacctgactccgttctacccgttcgacgaggacgtgcagcattggcaccaggtcgcccgcgacctgtgcacaccgttcggcgacgagcgctatgccgcgcacaagcgctggtgcgatgaatacttcttcctgcgccaccgcaatgaaacgcgcggcgtcggcggcctgttcttcgatgacctgcacggcgatttcgagcgcgatttcgcttatctgcgtgcggtcggtgatggcttcctcgacgcctacctgccgatcgtgcagcagcgcaaggacgccgcatatggcgagcgcgaacgcgagttccagctgtaccgccgcggccgctacgtggagttcaacctggtctacgaccgcggcaccctgttcgggctgcagagcggtggccgcagcgaaagcatcctgatgagcctgccgccgcgggtgcgctgggagtacggcttcaccccggaagcgggcagcgccgaggcgcgcctggccgactacctggtgccacgcgactggctctgatcgtccggcgccacgcctgatccgtggcgccttcttacgcctgtggtgcgccccgcgccggacaggccctgcactgcctccttcaaggatgaccccatgcctgctgctgttcccttccgcccccgcgccgcgggctggcgctccctgctgttgcttgcattggcctcggccagcctgccggccgccgcgcaatcgatggcctgcggcacctacaaggacgtcgacggcaacaccacgctgaccatcgaaagtgaaggccatggtttcctgtccggcccctaccaagccaccgagcagctgcgcatcgcccgccaggaggacgtgctcggcaccggcaacctgtccaccggccgcctggaaaactggtacttctcggacaacgatcgcacgatcagcaccccctatcgcgaattcacccgcgagcacaccgccgcctgcaagacgatgccggagcccatcgagggcggctgtgtaatgaacacctccgagtgcctggaggcgttgccggaagccgaaccgctgaagctgcatgcctggtgcgccgaaggcgtgggcgcggcctgcatgcagctgctggagacctaccagcggcaggccaaggacgcagcgccggcgcctgcacgttccgagccgccgatgccggagatctgcaaggaggattcggcgtcgttcaatgccgagggctgcagggcgatcgccgaggtggtcggcgccgagatgatgggcaaggccgtgctcggcctgcagcattcgaacgaccctgtcttgccgaccgcacagctcgatgaactggccgcactgtgccggcagcagcacggcgaggcgttctgcgccgacgttgccgaggcgctgtggagtggtgggcgcctgttgcaggcccatgaggcgctgcagctgtcgtgcgcccagcgcgcggatggcgtggcctgcggccgcgccgaggcgcttgcccgactggcctcggtaccggccgctgcactggccccggtgccggcttccgcgctgccctgtgggggctatgaagcggagtacggcgtgctctcgcagctgcgcttcctcgatggtggcctggtggaagccgggggccgcgaccagcgcctgcgcgcgagcctgcaggacgggcgcatcctcatccatcgcgacgtcggcagcgacttcgtactgcagccgctgaagaacggaaacctggccagcgtcgacggcggcaaccgcttcgcctactacgagcgcaagccgggctcaggcaatgccagctgcgcaccgccggtggccttcgtggagatccccctgccgctggactgcccgaccctggaccgcaaggacggcgccaaggcctgctgcaccgatggcaagctgctgggctgcaaggttgccggcgaggcactgttcaaaaacgaacaatgggccgcatcgctgtcctacttccagacgctgtgcagcgcgggtgtgcgcgaaggttgcctggcaatggccgcggtgtatgcgcatactgcggatccgaagattccgcaggccatggcggcgatctgcgcgaaggacgccaagggcacccacgtcgcctgcgatgtggacgcgacgcgcaactggccggcgctgaaggctgaagccgctccctgaggccaggcacctgttgagccgggcatgggcccggcgctacgaggtcaggtgctcttccgcgcgatgatcgtgatgtgcccggtcgtctccagcagggcgatctgcacgtcctcgatccgcaggccgccctgttggcgcagcgcggcatcgaaatcggcccggctgatcagttcgcggcggagaacgccctccaacagccggccatcacgcgcgatcacggtgggctctccttcgatcatccgctccatgcgccgattccgggtggtcaaccagcccaccccgtagttcagcacgatcagggtggccgccagcagcaggccaccgcccagcgaggtgtcggtgcccagcagcgcgttctgcaccgcgttgcccagcagcacgatcagcagcacgtcgaaaggcgtgatctgccccagagcccgcttgccgcccagccggaccatgcccagcaccacgacatagaccaccaccgcgcgcaggatgaattcccaccacggcatggccagggcgaacaggtcgggcatggtcttcccctgcggaacggtggcccagcctagcacctggggtcagatccctttgcccggcgggcaaagggatctgacccccagtgtgtgttccgttggcgcaaataaaaagccccgctgaccagggggaggtcaacggggccggggaacgggcacttggggaggagtccccgttccgagatctgctccaggggatgggagagatccacaacaggcgttgcgcctgtcgggagttatagaagcacttcgaacactaacggttcgtgaaggggccccatttaatgaatttcaataggggcaacattcatggtcgagtcagaaacacccgactcatgaacaaattcacgtcgttttcggcctgaaacaccgtcagtgcgcttcgtcccagttgttgccgacgcccgtgtcgaccaccagtggcacccgcagtttggccgcttgcgacatgcgctccaccacctgcaaacgcaggtcctcgacgaaactgctttcggtttcgaacaccagttcatcgtgcacctgcaggatcatccgtgccggcgccccgctgtcacgcagccactggtccacatccaccatcgcgcgcttgatgatgtcggcggcagtgccctgcatcggcgcgttgatcgccgcgcgttcagcaccggcacgcaggccctggttgcgggcgtggatgtcgttcaggtacaggcgacggccgaacagggtttccacgtagccctggtcacgggcctgctggcgcatccgctccatgaagtcgcgcacgcccgggtagcggctgaagtacagcgccacgtagtcctgcgcctggccacggtcgatgcccaggttgcgggccaggccgaaggcgctcatgccgtacatcaggccgaagttgatggccttggcggcgcggcgctcgttcggggtcacttcctccagcgtgcgcccgaacacctcggcggcggtggcacggtgtacgtcggcgccctgctcgaaggcacgcaccaggcccgggtcctcggacaggtgggccatgatccgcagttcgatctgcgaatagtcggccgccagcagctggaaaccttccggggcgatgaacgcgcggcggatgcggcggccgtcctcggtgcggatcgggatgttctgcaggttcgggtccgacgaggacaggcggccggtggcggcaccggactggtggtagctggtatgcacccggccggtgtccgggttgaccatctccggcagcttgtcggtgtaggtgctgcgcagcttggccaacccgcggtagtccaggatcacccgcggcaactcatgctggtcggcaatcgcctccagcgcctcttcattggtgctgggctggcccttcggggtcttcaccaccgccggcagcttcagctcgtcgaacagcaccgcctgcagctgcttgggcgaatccaggttgaagctgcgcccggccagctcggtggccttctgctgcgcggccagcatgcgcgaggacaggtcctggctctgccggcggagttcgtcggtgtcgatccgcacgccattggcttcaatgctggccagcaccggcaccagcggcatctcgatgttgcggtacacgctgtccagcgccggctcggccagcagctgcggctgcaatgcgtggtgcaggcgcagggtgatgtcggcgtcctcggcggcgtagcggctggcttcgtcgatgcccacctgcgagaacgggatctgcttggcgcccttgccggccacgtcctcgaacttgatggtgctgtagcccaggtaacgcagcgccagcgaatccatgtcgtggcgggtggcggtggaattgagcacgaagctctcgagcatggtgtcgtcgtggtagccctgcatcgccacgccgtggcggcgcagcacatgcaggtcgtacttgccatgctggcccagcttcttcttcgccgggtcctgcagcgccgggcgcagtgcgtccagcacctgctgcatgggcagctgggccggcgcacccgggtaatcgtggccgaccggaatgtacgccgccctgcccggctcgacggccaggctgatgcccaccaggcgcgcgcgcatcgcgtccagtgcatcggtctcggtatcgaagctgatcaggtcggcctgctgcaggcgttcgacccaggcctgcagctgctcggcggtcagcacggtctcgtactcacccggcgcggacagtgccggatccagcgtgccggcggcgggcgcctcgccgctgccacgggcgaagccagcggcggtgccacgcaggctcggggtcgcctcgctggcggccaccggtgccggcaccggcgcgcccagctccttcagcgcctgggtgaagccatagcgcgtatacagctcggtcagcgccggcacatcctgctcgcgcagggccagcgtggtcgggctggcgtccagctgcacgtcggtacggatggtcaccagctcgcggttcagcggcagccgctccagtgcggcacgcaggttctcgccgatcttgcccttcatggccggcgcggccgccatcacgccgtccaggtgctggtactcggccagccacttggcggcggtcttcggcccgcacttctccacgcccggcacgttgtcgaccgcgtcgcccatcagcgccagcaggtcgatgatctggtcggcgcgcacgccgaacttctccatcaccgccgcatccgaatccatgcggctgccggtcatggtgttgaccagctcgatgcccgggcgcaccagctgggcgaagtccttgtcgccggtggaaatggtcaccttcaggtcctgcgccaggccctgaagggccagcgtgccgatcacatcgtcggcctccacgccggggatgcgcaggatgctgatgcccagcgcttcgacgatgcggcacatcggctcgacctggctgcgcagctcatcgggcatcggcgggcggttggccttgtactggtcgtacaggtcgtcacggaaggtcttgcccggggcgtcgaccacgaacgcgacgtaggccgggcgctccttcagcgtcgaacgcagcatgttgaccacgccgaacagcgcgccggtgggttcaccctgtgcattggacaggggcggcagcgcgtggaacgcgcggtacaggtaactggacccgtcgatcaggactaatctgctcatgtgccgattctacgcgcccgtgcctgcaccgcggcgacacggcccgtacaccgcgatggggcataatcagggctctttccaggcaaaggccccgccgatgaagaccctgatgctggcttccctgctcctgctcgctggctgcgccagcatgggtggcgcgggcgctcccccggtggacgtcaagggcgcggatgtatccaagcgcaccatggacaacggtgacaccatcgaggaataccgcgtgtccggccagctgcgcatggtcaaggtgaccccgtcgcgcggtgccccgttctacatgtacgacaagaacggcgacggccgcatggacaacgacaaggacggcgtgtcgccggtctactggaagctgtacagctggtgaggtgaccggggttgtgaccggggtcggatccctttccacaggaaagggctctgaccccctcagggccaccggcacggccccgatccccccacaaaaaacaacgccggcgcgcatcctgcggccggcgtcgggtcccctccccgggaacgcttgaatcagcgggtatggatcagcggatgaccagcaccggcagcgtgctgcgtgccagcacttcggcggtctggctgcccagcagtacacgggtcacgccacggcggccgtgcgaggtcatcacgatcaggtcgctgttgcgctcgccggcggtctcgatgatgccgtcggccgcatagcggtccagcacgtgcaccgggatggcggtgatgccctgctcggcggccttggccagcgccggctgcagcaccttctgcgcgccttcctcgcggtcggccttgtattcggggctgttcatgtagcccacgctccagcccatggcgtcgtacattccgacggcccacggctcggaaacagtgacgatatcgacctcggcgttgaggtccttggccagctccaagcccttggccaggcccttgtcggccagttcggacccgtcagtggcaatcaggatgcgcttgtacatggtggggctccgtggcggtctgccggatgggaacgacaccattgcacaccgtatgtgcaggcggcgccttgagcaggatcaatccggcgccgcgcagcggcgtgtgcgcaccgtcacgtggtccgggggacaggctcggcccgccctcttctgtagagccgagcccgtgctcggctgcttctggcgggaaaagcagcggagcatgggctatgccggtcgtcctgaccggcacccttcgggccgtcgcaagcgacgttggcagcggctcctgccgctaccttcggctctacaacaacgtcgctcaggcgatctgcaccacgcgcgcgttctggcacagcgggtagctggccacgaactcgtcaatcgcatcgcgcatcgcctcgaacgattggccgtacatgtacagcgcggtctcggtcgggccctgccaccagctgcagatctcgcccaggccgtcgatgttcccggacagctgctcgaacacgtggttggaatcgcactgttcgtagacctcgtccggcaggttcaggccatccaggtagatgcccaggccttcggtcacgccgaagctgcgatcggcctcgcctgcgccctgtatctgcgaacccttcggtgcacccagctgctccagcaggtcgatcagcttcggcacgcccgcggcatcgaccagtgccacttcgatatcgccgtattcgacctcacccaggtcggacatcgcggtgccgccgccggtcagctcgcccacctgggccgcctgcagcagcgcgtcgagcggatcctcgaacagttcgtggcggtgctccggctgcagccgggcgttcaacttcacggtgacgtgcagcgtgggttcggtcatgggggcgttcctggaagaagtgccacctattgtagagccgagcccatgctcggctgcttctggccggaaaagcagccgagcatgggctcggctctacaacagtctgtcaacgcaggaacggcgtgaccttgcgcttcagcagttccaccagcaccgggtccatgtactcgtagtcatacggaatatccaggcagatcacccgcttgccgttcaaccaggccttgtagcggctggacagccggttgcggtgggcgcgctccatcacgaacacgatatcggaccactgcagcagctcggggctgagcacttcctcggcgtcggccagcagcccggccgaggcggtctcgatgcccggccaatcggcgaatacctgctcggccgtcgggctgcgcaggcggttctggctgcagaggaagagcacattgcgggtcatgagcgcagcctaatcggggtcggatcccttttccaacggaaaagggctctgaccccactcaggtacattcggacaagttgcatggccggaaaacactcgaaagaccatcatgggcctttccaccgtccagatgcccatgatcaccaaggatgacctgttaacgacgttcgcagaggtagccgaggcgcacgactgctacttcagcaagtacgtagtcgcgacgtacgtgctctattgctgcatcagaaatgccaaggaacatgacctcgcgatcgcgtccaaaaatgtcgatgatccggagttcgccgccagcgttgtgctgaacgcgccgccccgtctttcacatgatgggccaacgatctttgaaattccttccaacgcctatgggttcactcatgcgatggtggttcccagcacttatcacgggcttctgaatgggatcgagaagcgcacgggtctgttcctgtgcctgccgatcttccggtgtgagttcaacggcaacgaatcagcagaggatttcaggtggtccacacatcacatcgttgacgtcaacaactggcataggaccaggcagccgaagatcagcgtgtacctcgacaatccccgcactggtggcggcacggacaaggacggtgccattgtgagcctggagacattgatagcggagatcgacaacgttagcggagtgagcaacggcttcatcgagatcaccaactaccgcggcgaagtgatcgaggtgttgtcgccggcggaaggccactacgcgctgatccgcaaccgccaggatgaagaagcgatggaccgcgccgggttggtggcagccgtggagaagttcaccatcggctgatagccgaccgctgttgtagagccgagccatgctcggctggttttcccgcctgaagcagccgagcatggctcggctctacaggaattcccgccccctgacggtgatcagatcaccgtcaggttggcgtaggccatcaccagccacttgctgccggcatcagcaaactcgacctgcacgcgggcgtgcgcgccgctgccttcgtagtcggtcaccatgccttcgccgaacttgggatgggtgaccagcgcgccgagcttgaccggcggcgcctcgatcgaggcatggcccatcacccggctggcgcccatcgaagccgggcgcgagacctgcaccttcgggcgcacttcgtgcagcagttcgcgcggaatctcgcgcaggaagcgtgacggcaggctgtagttgtcctggccgtggatgcggcgcgattcggcatagctcagcaccagcttctggcgcgcgcgggtgatgccgacataggccaggcggcgctcttcttccagccgcccgctttcctccagcgagcgtgcgctggggaacaggccttcttccaggccggccaggaacaccagcgggaattccaggcccttggccgagtgcagggtcatcagctgcacgccctcttcgcctgcctgcgcctggccctcaccggcctccagcgcggcataggccaggaacgcgaccagctcgtccatgtcctcgcccacttcctcgatgtcgtcggcccggcgcacgaagcgcgaggccaccgagaccagttcgtcgaggttgtcggtgcgcgactccgagtccagcgcgttgcggctttccttgctccagtgctcgcgcagctgcgagcgggccagcacgtggtccacgcgctcggccagggtcatgtgcacggtctgcgcctgcagctcgttgaccagccccaggaagccggccagcgcattgcgcgcgcgtgcggccagcgcgttgccctgggtgaccagcatcgttgcttcccacagcgagataccctgcgcgcgtgcctcgcggcgcacttcgtccagcgtgcggtcgccgatgccccgggtgggcgtgttgaccgcgcgctcgaacgcggcgtcatcgttgcggttggacagcaggcgcaggtaggccagcgcgtccttgatttcggcacgctcgaagaagcgcatgccgccatacacgcggtatggcacctgctcgctcagcagcgcttcttccagcgcgcgcgactgcgcgttgctgcggtagagcacggccacttcggtgtagctgccaccgtcgcgcacccactggcgggcacgctcgacgatgtagcgtgcctcgtccatctcgttgtacgcggcgtacaggtcgatcggctcgccgtcaccgctgtcggtccacagctgcttgccgatgcgatccgggttgtgcgcgatcaccgcgttggcagcgccgaggatgttggcggtggagcggtagttctgctccaggcggatggtctgcgcgcccgggaaatcgcgcaggaagccctgcacgttctcgaccttggcgccgcgccagccgtagatggcctggtcatcgtcgccgaccacgaacacgtggccggaatcgccggccagcacgcgcacgaaggcgtactggatggcattggtgtcctggaactcgtccaccaggatctcgcggaagcgggcgcggtagtgcgacagcagcgccgggttgtcgcgcagcagttcgtgcgcgcgcagcagcagctcggcgaagtcgaccaggccggcgcggtcgcagcgcgcctggtactcgatgtaggcctggcgcatggtctccagccacgcgtcgtgcggttcgggctggatgtgctgcgggcggcggccctcgtccttctgcgcgttgatccaccacgcgatctgcttgggcgggtacttgccgtcgtccagctccagcgcctgcaccacgcgcttgaccagccgcagctggtcgtccgaatccatcacctggaagccttcgggcagcttcgcatcctgccagtgcaggcgcagcaggcggttggccaggccgtggaaggtaccgatccacatgccacggctgccatggggcagctgtgcgtcgatgcggtggcgcatctcgccggccgccttgttggtgaaagtcaccgcgaaaatgccatgggtcggcacgccatcgacttcatgcagccaggcgatgcggtgggtgagtacgcgggtcttgccggaaccggcaccggccagcaccaggtggtgaccggggggagcggagacggcttcgcgctgggccgggttcaggccatcaagcaggtgggagacatccatgcccccattttacggcatcgccgtcgcggctcctgcgaccacctgggtggccagtgcctgcgcctgctgacgcagttcaggcaccgccaggctttcccacaggctgccgatgcgcaggctgccgagtacgcccagccgcgcctgcggctggccaccggcggcacgcaggcggtcgcccggcactgtgctgtccaggcccagcccgtgcgggccggggcgggccaggccatcgctctgcagctgctgcagcaagggattgcgcagcgcgctggcgcgggtttccacgccggtggcgttgatcacgccgccgatcgtccagtgctgttcattgccagacggagcgcggccagaaagccgcagcgcttcgccttcgcggccgacgcgttgcaggcgggaccggtgaatacgcagttggccgctttcgatcagcgcctgcagctgtgcgtcgacctctttggcgatgcggtggcgatgcacgtcccagtagcgcaccacatggcgcaggaagcggcgctggtcggccgcgtcgaggctgcaccacagtgcctgcccgtgcggacggatgcggtccatcaccccctgccacggcagaccatcggcctgcgcctggcgcgcgaacccgcgcaacgcgcgcaggcgctggcgcaggctcatcggcagcagcgcagccgggtcgaacgcgggcaggccgccatgcgcatgcggcagcggcagcaggccatggcgcgagatcacgtgcagcgggccggtgtggccggctgcaaccagcgccagcacggtgtcggccatgctcaggccggagccgacgatggccacggcctgctcaccggccagggtgcgtacgccgtcgtagtcccaggcctcgatcacgtcatcggcgggcagtgcctcggcaccggctaccggcagcggccgcatgctgttgccggtggcgagcactgcctgtgcggcgtgcagcgtctggccatcgccgagtgccagctggtagccgtggtcatccggctgcaggcccagtaccggctgcacgatcacctgcagctgtgccgggctggccgcggcggcctcctgcaggcgctgctgcaggtacgctgcaaagtagtggcggcacacgtaacgctcgcccagcacctcgcgcgcctcgcccgggtaggcgttggcggccatcaggtagtcgaggaaatcgccgggctggtcggcaaacgcactcatcttcgccgccggcacgttcagcaggtgctccggccacggcgtggcataggcgatgccctgcgccagctgcgaagccggttcgaagatggccagcgccagcggcgcctgggcctggcgcaacacctggatcgccaccagcaccccggccgcaccaccaccgatgattgccaggtccagttcgccattacgcggtgaatcagtcatgcgccgattgtaggccatcggcgatgacgggccggattgccgaagcgggcggttgccgccgtttcacatcaacgcatcggccagccgtgcgatgccttcgcggctgcgccgccacgtgggacggctgcgccactgctgcaggtccagctgccgcgactcgcgcaggtagccatcctcgatcgcgcacagctgctgcaccagcgcgcggtcgtagcagaccaggccgatttcggcattcagcgcgaacgagcggatgtccatgttgatcgagccgagcacggcgatgtcctcgtccacgctcatgtgcttggcatgcaggaactgcggctcgtacagcgcgatgcgcacgccacagcgcagcagctcgtcgtagtaggcctcctgcgcccacgacgtcagccgctggttgttgctggccgacaggatcagctgcacctgcacgccggacaaggccgcaatgcgcaaggcgctgagcgtggcttcgtcgggcacgaaatacggggtgaccatcaccagccggcgccgcgccaggtggatcagcgccgccaccgcatcgcgtgcgttgctgtacggataagccgggccgctgggcagcagctgggtggcgatgtcgtcactgcactcgggcacatcggcgatcacgtccaggcgctggccggtttccatgtaccagtcgctggcgaagaccgcttccagatgcgccaccgccgggccgcgcacgcgcgccaccagttcgcggttcgggtggccgggcacgaactgcgggccggccaggttctgcgaaccgacataggccacttcgttgtcgatcaccgcgatcttgcgatggttgcgcaggtccatgcgcccgctgcggcgccagcgcaggccaccgggcagcatcgcgcgcacttcgatgtcgcgcgcctgcaggcgcttgcgataggcacgcaggccgcgcttggcgcccaccgcgtcgagcagcacgcggcactgcacgccacgtgcagccgcacgctgcagggcctcgacgatcgcctcgcccaccgcgtcgtcgaacatcaggtagtacagcaggtgcacgcggtcttcggcctggtcgatgtcggcgatcagcgtgtgcagtgattcgtcgtagtcggtcagcagatcgacggcgttgccgtgcaccggcatgaagtcgccctggcgctgcaccagcggcacgatctcggcgctggcggtgtccggctgcggtgtccagcgcaggcgatgctgcagcgcctgttcctcgcggatgacctgcgaggcctcggcctggcggcggatgcgctcgcgcgacagccatgggtggccgaacagcaggtacagcggcaggcccagcagcggcacgaagccgaccagcagcagccagctacgcgccgcccccggcgtggtgcgggtggggatccagcacagtgcaaccagccggatcagccagtcgatcagcagcaggtacgaacccagcaaccactcgaacagcatcgtgtcgcccgtcgggaggtgatgggccattctgcccaccggcccttgtggagtcgagccgcgctcgacgaccttccggtccgaccgcacagcagccgagcgtgggctcggcgctacaggatggctcaatgccgcaccggcacctcgcacagctgccgcaccgcgtcggcatggcgacggccgttgagcgccatgcaggcgatcgcctgtgcggcccgctccagctgcgcctccggcagcggcgacggcgcgccgttggccagtgccagatggtggtcgcacagcagcagcgccatgccctcgatgccttgcagcatgcgctgcaggcgcagccagcccagttccaggtcctgccggtgtgatggggtgttcatgcaacctccttcaacggatctggccaccgtgaaggtggcggacgatgcgtggttgcaataccgggaacggtagccaccaaaccggcgggcgcgaggcccccacgcaccgtccgccatagaggcagatgggtcgcccgccgtcggcggagctttccggcaacggcgggcgagtttactggctaccgattcgacgggattgcaagcccgaccactgcaaccgcagcggccagccatcatgggcacggcggggcccgtcgttccaatcgatttgaaccgcgcgaggcggcagaaccggtaggaacaatcacttatcgcattcggcccttcacctcaggcagggtgccattggcgacagcgtgcgcagggagtgcggcagtgccgaagtctgcacgccaggcatgaaaaaacccgccacaagggcgggtttcttcgcggggaccagcaatccttgcggattacttgatcttgccttccttgtacaggacgtgcttgcgcacgaccggatcgtacttcaggaattccatcttccccggggtgttcttcttgttcttgtcggtcgtgtagaagtggccggtaccggccgaggaaatcatacggaccttatcgcgcttgcctgccatgatgctttactcctcagaccttttcgccgcgcgcacgcagctcagccagaacggaatcgataccgttcttgtcgatggtgcgcagtgcatgcgcggaaacacgaagcttgacccagcggttctcgctggccacccagaaacggcgctcgtgcagattcggcaggaaacgacgacgggtcttgttgttggcgtgcgagacgttgttacccgtctgcactcgcttgccggaaacctggcatacgcgggacattgcgcacctcgatagtagtagttgtcagcccgtagcccgggcgacggcggcctcgatggttgcccaccacacgtcaagagaatcaaagggttacgctggcgttgggcggccggggacgtgctcccgggagcgccgcccggtagaaaaccggacacagcgagccgcgcattatgcacgggttcaagcacttgcgcaagttacccacaggcggggactggaccggcggggcggggggacttcgccaaccggcatactggcccggatcactgcggagctttccatgcggctgctggccctgacctacggaaccgaaggcgatacgcgtccgctggccatgctctgccatgggctgatcagcgcaggccacgcggtgacactgctggccgatggcggcaccctgggcagcgcgcaggccctggatgtgccccacgcggcccttgagggtgacatccatgacgaagtggtcgcccttgtctcgcggggcaacggtgttgccgccgccagtaccggtctggcacggatggcgctgcagcatgtcagcggctggatgcgccaggccgatgccgccgccgaaggctgcgatgcgattctgaccggcggactggcggcccttgtcggcatgagcgtgggcgaacgtcggggtctgccggtcatcggcaccggcatgattccgctgaccccgacgcgggccttccgctctccgttcctgccgcccggacgctcgccgggctggttgaaccgggccagttacgggtgggtcaacggcctgatctggcgccagttccgtcggccgatcaacgcggcacgccagcaactggggcaatcgccgcgtcgcgcgctgtggtccggcctgccgatgctctatggcatctcgccgcagctgctgccgccaccggcggactggccggtcgaccacatcgcctgtggccaatggcggcttcctgatgcgccctggacgccgccagccgatctgcaggccttcctcgatgccgggccgccgccggtctatctgggctttggcagcatgaccggattcgatcgcgagcgcgtgctgccggccctgctgcaggcgctggcaccgcgccgggtgctgctgtttccagggtgggccggattgccgacgggtgcgctgccagcagatgtgttcgtgctcggcgcgacgccacacgaagcactgttcccgcattgcgcactcgccatccaccatggtggcagcggcaccacgcattcggcctgccgcgccggcattccctcgctggtgatgccgttcgccgcggatcagttcttctgggccgatcgcctgtatcggttgggcgtggcaccggcaccgttgtcaccgaagcgactggatgcagcaacgctggcggcagccatcaccttcgttgaaaccgacgcaacacgcgcacgcgcggcggccctgggcgtggcgatgggccatgaggacggggtggcctgtggcgtggcgatgatcgagcgctggttacggccggtgtaacagcggccaggcctcagcgcaggtgcggaatcacctgcgccagcagatgggcatccttgagcgcgccgtgcaggccgcgctggctgggaatgcgcaggcgctgcagcacatcatcgagcttgttgccctggccgggccagcgcccgcgcgccagcttcaggctgcaggtgatgcggcaatgctgggccagcgtgccgggaataccggacagacgcagctcgttgtccaggaagcccacatcgaaggtggcgttgtgcgcgaccatctcgctgccgcgcaggaagtccagcagttcggcggccttgctggaaaacagtggcttgcccaccagcatcgcatcactgatgccgtgcacgcgctgtgcaccccagtcgaccctgcgctgcggctgcaggtaggtgtggaactggcggccggtgagctggccatcgatcagttcgacggcaccgatttcgatcacccggtgccccaggcggtgggagatgccggtggtttcggtatccagtgcgacgatgcgactcatgcgtggcgatgtttcctgttacgtgctgtagtgattttcgcatgccggtagagccgggcccacgctcggctggcgcgcgtagcgcgggcttggtgatgccagaagcagccgagcgtgggctcggctctacagatgcgcgcgcgcgatcaacccaacgcctccaccacccaatcgatgaacacccgcagccgctggctcatgtgccggttcggcgggaacatcacatgcatcggcatcggcggcagctgccagtccggcaacaccggcaacagctcgccgcgcgccacgtgcggctcggccatgtagctgggcagcgccaccacgcccaaccccgccaacgcagcggccagataggcgtttccatcatcgaagccgaccgtatagcggccctgcacctcaacgcgttcatcgccgcgctgtgcaatgaacacgcgtgcgcggccactgcgcgggctgaggaagccaaccatgtggtgatcgggcccttgcagcgcgcgcggatcggtcggcaggccgaaacgctgcacatagccggggctggcgtggaagccgatcggcagcgccgccagcggccgcgccactagtgccgggtcggccggggtgccaccccggatcacgcagtcgacgttgtcggcgatgacatcgacctcgcggtcactcacgccgatgtccagctggatctccgggtagcgcgcctggaaatccggcaacgccggcaccagccgcagccgcgcgtacggcccgggcacatccacgcgcaggcgtccgcgcggctgggtggccgcgtcgcccagcccgccctccacttcttccagctcggccagcaggcgggcgatgcgcgggtagtaggccgcgccgtcggcggtgacgctgacccggcgcgtggtgcggttgagcaggcgcagccgcaggtgtgcctccagttgctgcaccagctgggtggccgtggtgcggctgatctgcagggtctgcgcggcgcgggtgaagctgccggtttccaccacccgggcaaaggcccgcatcgcctcgaaacggtccatggcgggccattattgtttggaattgacaatcaatctaggccgattatcgcggtttatccagacagcgctgacggggaggatggcgttctctcccacgggatcttccccatgtcacagcgtgatgtcgttttccccgccggccgccaggccctgtacgagcgcaaccgctactcgcctgcgatccgttccaacggcttcctgttcgtatccggccaggtcggcagccgtgaggacggctcgcccgagccagacttcgaaacgcaggtgcgccgcgccttcgagaatctcaatgcggtgttggctgctgccggctgcacgttcgatgacgtgatcgacgtgaccgtgttcctggtcgatccagagaagaactttgagaaggcctgggcaatcgtgccggagtattggggcgaggcgccgcacccgaccctgaccggtatcggcgtgacctggctgtacgggttccagttcgagatcaaggtgatcgcgaagctgccgtgatacgggtagtgccggccgctggccggcaacgcggtggggtcgaaaagcgtgtcgaccaaggtcgacacctaccagagcacatgtgcgcggcgcacccgaacggtgtggtggggtcagagccctttccggaggaaagggatccgaccccgcgcccggcccagctgaacgggagattccgacgaattcccgaagcgtccattgatattgtatccggcgaaaaccgcttgctagcctgccgtccatgcgctggatcacccgccacctccgttcgaccctgctgatgctgctgatggcggcattcgtggtcgtgccggtggccgacgcgctggcctgcacggtggaaccgcatgccagcacggtgcatgtggagtccgcaccggatgccgatggcgatgccgacggcaagcacgtcggtgcctgtggccacaaccactgccaccactccaatctgagcctgccggccagtaccttcgccgccttcggtgcgccgcttccggcgcgctggatgaatgccggcgacgcggcgacctatgcggtcgcccaggatgaactgacgcgtcctccccgggcgtgagttgagcgcgtcccgcattcgcgggcttcggttcccctcacctccggaaattcttcatgtcgaccctgacacgtcggccgctgcgtgcggccgggcgggtcgtcgccgtgttgctgggcctggccccggcggcatcggtgatggcgcaagccgccccttcctacgacaccctgcttgaacgcctggaccagctgcccggcacccgcgtcggtgcggcgctggccgaggccgccgacgcgcgcgccgaccaggcccgtgcgttgcccaacccttccctctcttactccgccgaaaacgcctggggcaccggctcctatggcggcatgggcaaggccgataccgtgctcaccctgtcccagccgctggaggtctggggccagcgtggcgcgcgtgtccgtgccgcccgtgccgaggcacaggccgccaacctgcgtggtgcccaaagccgcagcgacgtggccagccagctggcggtggtctatgcacaggcggaaagtgcactgcgccgctacaccctggccgaagaagcactgagcctcacccgcgctgacgccaacgcggtcaacgcgatggtcaagcagggccgcgagccgcagctgcgcgccgtgcaggcgcagagcgaagtcgccaacgccagcgccgcgctggatgaggcgcaggccttccgcgatgccgcgctggcccgcctggccggtgccgcgctgctggatgcgccggtgcagtcgatcggcgacagcctgctcgaccgcgcgccgccgttgccacgcggtgccaccgataccgcgctggcggtgcgcatcgccgaagccgaagcggatgcggcgggcaagctggtcgacgtggagcgcaagcgcgccctgcccgacctgagcgtcactgccgcgcagacccgcttccgcgaggggggcgagcgcgcctacaacctcggggtcagcctcagcatcccgctgttcgaccgcaaccgcgggggcatacgcgccgccaatgccgaccagcgcgcggccgaggcacgcctggaccagcggcgccgcgacagcgaggcggcacgcctctccgcggtggccggtttgaaggccgccggcagccgtacccgcgccgccgatgaaagcgtggtcgccgccgaagaggcgtatcgcctggcccgcatcggcttcgacgccgggcgcatctcgcaactggaactgcgcagcacgcgcagcgccctcatcgccgcccgcggcaccgccgtggatgcgcgcctgtcgcgcgtcgccgcggaaatcgatcttgcccgccttgaagggcgcgcaccttttgtggaggtcccatgacgctctcccgtactttcccgctgatcggcggcgtgctgctggccgcgctgctggccggctgcgctggcaacgcgcagacacctgccaatgaagacccggctgcggccaaggccggcaccgacgatggccacggccatgccgccgacagcaaggcggccaaggccgaatccgcaaaggcgcccgccgatggcgatgagggtgtcgtgcagctgactcctgagcagatcaaggcgtccggtatcgaagtggtcgcggtcggtcgtggtggcggtagctccacgcgcctgtccggccgggtcgaaccgtcggtcggtgcacgcgcctcggtggcgtcgaccgtgaccggccgcgtcgaacgcgtgctggtcgcaccgggcaccgcggtgaagcagaaccaggcactggcgatcgtggtcagcggcgaagcggcggtgttccgcgccaatgcgctggccgcctcggccgaagccgaggccgcgcgcctggcctatggtcgcgacaaggcgctggtcgaccagggcgtggtcgcccgccaggagatggaagcctcgcgcgcacggtcgctggcagcacaggcccaggccgctgccgcgcaggcccaggccgctgccaacggtgcgcccgatgccagtggccgcgtgcgcatcaccagcccggtggccggcatcgtcggcaacgtgcaggtcactccgggcggtgtagtcgccgccggcagtgcagtcgccgatgtcgccgacccgacaatgaacgagctggtgttcaccgcaccgccggcgctggccgcacaggtcacgcccggcatgacgctggaagtgagcgtgccgggtggcagcttcaccgccaccgtcaccggttcggccgccgatgtgcgccagcagggcggcgtcgcggtgatccgcgccaccccggtggatgcgtcgctgccgccggccggttcgccggtctcggccgtggtggtcaccgaaggccaggacggttcgctcagcgtcccggccgatgcagtgcagaacgttgatggcagcagcgcggtgtttgtcgccgtcgaaggtggcttcaaggcgcagccggtgctggccgggcgccgtgccggtgaccgcatcgagatcctcgctgggctgaccggcagcgagcgcatcgtcggtgccaatgccttcctgctcaaggccgagctggccaagggcgaagccgagcacggccactgaggaggcgaccatgttcaagctgatcattgaaacagcggtgcgccaccgctggctggtggtgttcatggccgcactgatcgccgcggtgggcctgttccagctgggcaagctgccgatcgacgcggtgccggacatcaccaaccgtcaggtacagatcaacacggtagcaccggcgctgacaccggagcagatcgagcggcaggtgacctatccgctggaaaccgcgctggccggcatccccggcctgaccaccacgcgttcgctgtcgcgcaatggtttctcgcaggtcaccgcgatcttcaccgatgccaccgacatctacttcgcccgccagcaggtggccgaacgcatgcgcgaggcatcggaagacctgcccgatggtgcatcaccgatgctgtcgccggtcaccaccggccttggcgaggtgctgatgtggacggtggacttcaccgcgttcgatccggccaaactggccaaacccgatgaagcgggctggcaggccggcgaggtctaccgcacaccggaaggcaacctgctgcgtacgcccgaagaacgtgcgacctacctgcgcaccgtgcaggactggatcatcgcgccgcagatgcgttccagcccggggctggccggcgtcgatacggttggcggctacgtcaaggaatacggcgtgcatccggacagcgccaaactggccgcgcatggcctcggcctggccgacctggtcactgcgctgcagcgttccaacgtgcaggccggtgccggcttcgtacagcgtgccggcgagggcctggtggtacgtgccgacggcctggcgctgaccaccgacgacctggcacaggccccggtggcgacccgcaatggcgtggtggtacgcgtagccgatgtggccacggtggaactgagccgcgcgccgcggctgggtgcggccagccgcaacggccatgaagccgtgctgggcaccgcgctgatgattgccggtggcaacagccgcaccgtggcccaggcagcggccgcgcgcctggaacaggtaaacaagtcactgccggccgacatcgtggcggcaccggtgctggaccgcagcgtgctggtcaattccaccatcaagaccgtcgccaggaacctcaccgagggcgcgctgctggtggtggtggtgctgttcctgctgctgggcaacctgcgtgcggcaacgatcaccgcgctggtgattccgctgtcgttcctgttcgcagtgatcggcatgaaccgcttcggcatcagtggcaacctgatgagcctgggtgcgctggacttcggcatcctggtggacggtgcggtgatcgtggtcgagtcgacactgctgatgctgggccagcgccgcgccgaactgggccgtgcgctgaccgcgatggaacgcctgcgcgtagccgccgattcggccattaagatggcgcgccctgcggccttcggccagctgatcatcctgctggtgttcgcgccgatcctcacgctggagggcgtggagggcaagacgttccacccgatggcggccacgttcatgctggccctggtcggtgccttcctgttctccttcaccttcgtgccggcgatggccgcgctgctggtgcgcgagcccaaggtgaaggacggcgatgcgcacgcggacgacggcgagcacgaaaccaggctgatccgcgtgctgcgtgcgcgcatcgaaccggtggtgcgcaaggccgtggcgcacccgcgcacggtgctggccggtgcggtgatgatggtggtggtgggcatcggcgcgttctcgctgctgggccgcgagttcatgccgaccctggatgaaggcaacgtggcgatgcaggccctgcgcgtgccatcgacctcgctggagcagtcactggcaatgcagctggcgctggaaaaggcgattgccaagcagccggaagtggaaaccgtgttctcgcgcaccggtaccgccgaggcggcgatcgacccgatgccgaccaatatttccgacagcgtgatcgtgttgaagccacgcaaggactggcccgatccgacgctggccaaggacgcactggtggcgcgcttcgagaaactggccgggcagcagctgggcaacagcttcgagttcagccagccgatcgagctgcgcttcaacgaactgatttccggcgtgcgtaccgacctggccgtaatgatctttggtgatgacttcagccagctgcagaaggtggccgaccaggtggcgttgaagctgcgtgcggtggatggcgcggccgacgtgcgggtggaacagatctccggcctgcccacgctcaacgtggcgatcgaccacgtggcggcggcacagtacgggttgagcgctgcagatgtgagtgatgcgctgtccaccggcatcggcggtaccacggccggcaagatcttcgaaggcgaccgccgcttcaacgtggtggtgcgcctggacgatgcctcgcgcaacgatccggaccagctggcctcgctgccgatcgccacgccatcggggctcgtgattccgttgtcgtcggtggcgcgcattaccgtgagcgaagggccgaaccagatcagccgcaacaacggcagccgccgcgtggtggtgcaggccaacgtgcgcggtcgcgatctgggcggcttcgtcggcgaggcgcaggccgcggtggccgacgtggcgctgccgccgggcgcctacctgacctggggcggtcagttcgagaacctgcagcgcgcggagaagcggttggcaaccgtggtgccggtggtgttcctgctgatcggcagcctgctgttcatggccctgcgcagcggcaaggaagccattctggtgttcagctgcgtgccgttggcgctggtcggtggcatcctcgctctgctgctgcgaggcatgccattctcggtatcggcggcagttggcttcatcgccgtctccggcgtggccacgttgaacggcctggtgctgatgcaggcgatccgcgaacgcctggacgccggcgacctgccgctgcaggcagcaatcaacggtgcctccagccgcatccgcgcggtgctgaccacggcgctggtggcgatcgtcggcttcatcccgatggcgattgccagcggttccggtgcggaggtgcagaagccgctggccacggtggtgatcggtggcctgatcaccgccaccgtgctgaccctgctggtgctgccgaccttcgcagcacgggtggccaagccgcggccggtggggtgaggcgagagggggtcggatccctttccacaggaaagggatccgaccccgtgaccgggtcgggttgccggccagcggccggcactacccttgcacggtcaggccttcttgcgctcggcgatgtaggcctggatctgctgttccagcaccggcagcggcaccgagccctgcttgagcagggtgtcgtggaagcccttgatgtcgaacttgtcgcccagctccttctcggcctgcgcacgcaggcgcacgatggcgatctcgcccagcttgtagctcagcgcctggctaggccaggagatgtagcggtccacctcggtggtcacttcatgctcgctcagcgcggtgtggtcacgcaggtaggccaacgcctgctcgcgggtccagcccttgctgtgcacgccggtgtcgatcaccaggcgcgccgcgcgccacatctcgtaggtcaggcggccgaaatcctcgtatggggtttcgtagatgcccatctccacgcccagcttctcgcagtacagcgcccagccttcgccataggcggagatgtaggcgttgcggcggaactccggcaggttcttctgctcggcggcgatcgcgccctgcagcgagtggcccggatcggattcatgcagggtcagcgccggcaggttgtacagcgggcgcgacggcaggttgtaggtgttgagccagtaggtgcccatgccaccgcggccggccgtccagaacggtgcgatgtccggcggcaccggcacgatggtgaagcgcgcgcgcggcaacgtcatgtacttgcccagctggccgtccgcccgcttggagatccacgcggcacgcgacagcagctcttccggcgtctttgcatagaactgcggatcggtacgcaggaaggtcaggaactcggcaaagctgcccttgaacttcacctgcttgatgatgtcgttcatttccttctggatgcgcgcgacctcatccaggccgatgcggtggatctcgtccggcgacaggtccagcgtggtgtactcgtggatctgctgccggtagtacgccttgccatcgggcatcgcttcggcggccagggtggtacgcgcctgcggcacgtactcgttgacgaagaaggtgcgcagctgctggaacgccggcaccaccttgccgctgattgcttcgcgcgcctgcgcctgcagcctggcctgctcggcggccgggatggtggtgggcagcttcttgaacggcgcgtacagcggcgactcggtcgggtccttcagctcggcgacggtggcgatggacacttcgcggccatcgagcaccgcgcgcggcacgctgaaaccacgcttcaggccggcgcgcatgttctcggtctgctggccgaagtagcgcggtacatcattcaggcgtgcgatgtagttctggtagtcctgcacggtcttcatctcgcgccgggccatgaaggacaggttggaccagaacgaggaatcggcgttgaacggcatctcgtagccgcgcaggcgcgtctcttcggccaggttgaacacctggtcgtggtagatcgcgtagttgacctggttgtcggccgacagggtcttcgggtcgatcttcttcagcgcggccagggtctcatcccacaccttcaggcgcgcctgctgcgcggccgggccgacgtcgggcatgcgggtggcgttggccggggcgtcctcgtcctcgctggcctcgccaccgccctgctggcgccacttccattccttctcgtacagcgcgcggaaggcggcgtcggcgggcgattcagtggccacgccggacggtgcggcggtggcgggcggcgcggccagggccacggcgggggcggacagggcgatcagcagggcaacggcaagacgggttttcacgagcacaggttcccgggaaggcagaccccgatcatggcaccccccatcgcccgtggcatgggacgaaggtcctgcctgcgcagcagaccggggccccggtagccaggtacgcagtagacccacgtcatgcgtggatgcgccgcggatccggacagggtgatccggacggggtcagagccctttcccatggaaagggatccgacccccggggcctcagtggctggccttgtcgcgcttccagccgcggtgcttgatgtccaggtgcaggctgtacagcgcggtgaacgccgggaacaggttctgcagcacgcccaccgagtcctgcttggccgagaacaggaagtagctcagcgtcatcaggctgccgagcacgctcatgtaccagaacaggcgcgggatcaccggcttgccggcgcgcttggacgcgacgaactggaccagccagcggccgccgaacatcagcgcgccggtatagccgatcagcttccagccggtcacgtgcaggccggtccagtacagccaggtcagcggctggtcgagccaatgcagctccagatccatcagcgctcctccaccgcggtgcgcttgctgcgggtgatcagccaggccacgccacgcaggtcgcggatgccgaccagcgcgcggccgaggttgttgtacttggacacgccagcggtacggtggcggtggttgaccggcacgctggtggtcttccagccggcgcgctgcatcagcgccggcaggtagcggtgcatgtggtcgaagtacggcaggtcgaggaacgcgctgcgttcgaacagcttgatgccgcagccggtatcgggcgtatcgtcgcgcagcatgcgtgcacggatggcgttggcccatttgctggcccagcgcttgctgccgctgtcctggcggttgacgcgccagccggcgaacagcttcacctgcgcctcggcggcgtcgcgtgcggcgagcagcttggggatatcggccggatcgttctggccatcgccatccagggtcgcgatccacggcgcgcgggcgtgcttgacgccggtgcgcaccgcggtgctctgcccgctctggttcacatggtgcagcacgcgcagttccggggtggccgccttcagtccctgcagcaccgccagggtgtcatcgcgcgagtgatcgtcgatgtagacgatttcgaacggcagccggccacgcagcgcggcggtgatttcggcgaccagcggggcgacattgtcgcgctcgttgaataccgggacgacaacggaaagctcgggttggctcataaggcactcggccaaaggggggacaaagaccgcgcattctccgctgccgaggttatccgaagatgaaccccgcggcgtgaggatccatcctcaggcgcgatcgccaaaatactcgcggcaccactgcaccacaggcggcaggccttcttcgatcggggtcaccgcatcgaagccgaaagcgtcatgtgcgcgccgggtatcggccatcgtgcgcaccatgtcgccgggctgcatgggcttgtacaccttctgcgcggggcggccggcggcctgctcgatcacgctgatgaagcgctccagctcgaccggcgtatggttgccgaggttgaacacccggtgcggcaccgggccgtcggccggatgcgcgagggcgccgaggataccggacacaatgtcggagacatgtgtgaaatcgcgctgcatgcggccttcgttgaacacatcgatcggccgcccggccagcaccgcgcgggagaacagcagcggtgccatgtccggccggccccacgggccatacacggtgaagaagcgcaggccggtggcatgcaggccgtacagctgcgcgtaggtgtaggccatcagctcattggccgccttggtcgccgcgtacagcgaacgcggctggtctacgcgctggtcctcggagaacggcggcgtggccgaatcgccgtagaccgagctgctggaggcatacaccaggtgctgcacgccgcggtggcggcacagttcgagcatgttgacgaagccgaccaggttgctgtcgacgtaggcgtgcgggttttccagcgaatagcgcacgccggcctgggcggccagatggatcaccgccgtcggctgcacttcatcgaacagcgcagccaggccctcgcggtcggtcaggtccagcgcgcgcaggtccagcgacgggcacagcgcggccacgcggtcgcgcttgatctgcgggtcgtagtaatcgttgaagttgtccaggccgaccacggcctggccggcctccagcagtgcgcgggcggtgtaggcaccgatgaagccggcagcgccggtgagcaggatggtcatggcaggggcctggaaacgaagttcaggcccctgatgttaccggtctcagaacaaaccgaaacgcttcttcgccacgttggtgcggccgggttcgattacatcctggatcttcttcgcgtcgaagcggtcgagcagcgcctcggcgcccttcctcagcttcaggtccatctcttcggggtacagcgggaccaggctcatgaagctgatggtcttgccgtcgtccagttccagcgtggcaaagtcctccggggtggttaccggcgtcagcacgatggcaccgtcgaagcccacgcccggcgcatagggctcgctgggatggccgttgggaatggtgtggccgaagcccagccaggtgtcgtactcgtgcggcaaccgcgccatgcccttcagcaggcgcaccggccagtaattgcgctcgtcctcgaaggcgtcctgggagatgggccagtccgccggcagggtcaccatcagttccatgtagcgcggcacgtccgcgtccacctcggcgggcacggtcatcggcaggtcgctcatgccggaggtgaccaggcgcaggtaagggcagtggccattggccggcaccacgtgcacgtcaatgtgcaccaggtcggagatgatctcgtggaagacaccggataccgggcccagatggcgttcgaggtgggcgctgatcgcctcgatgtggcgttcttcgccggtggcgagcacgaagtccttttcgcggcgatgtaccagtatctgggtgccgtccgggctgacgtcctcgtattcgttgctcatgtcctgctccctggatgaggccacggaccggaaggcagtgcattccctcggcgcgcgcggcggtacgttccctgtcattggcgggacacggcaggaacgggccgcgcccctgtcactgcgccgggctcagccctggcgcgtgcgcagcttttccagcacgccgtccagggtatccaggtcggtgtagtggatgatcagcttgcccttgccaccgcggccatgattgatcgccaccttggcgcccaatgcttcggacagttcggtctccagcgaggcgatatcagcctgctgcaccttcggcgtggccgccgggcggttgctcggcaccttgccggcggcgaaggcctgcgcacggcgctcgacctcgcgcaccgaccagccttcatcggctgcttcctgggccagcttgccagccagctcgggagccagggtcagcagcgcgcgggcgtggcccatttccaggcggcgggtttccagcagcaggcggatcgccaccggcagctccagcaggcgcagcaggttggacaccgccgcgcgcgagcggccgacggcctcggcggcctcggcatgggtcagggtgaactcgctgatcaggcgctgcagcgcctcggcttcttccagcggattgaggtcttcgcgctggatgttctcgatcagcgccatcgcgatgacggtgcggtcttccagctcgcgcaccaccaccggcacttcgtccaggccggccagctgcgatgcgcgccaacggcgttcaccggcgacgatttcgtagttgcctgccggcagctggcgcaccaggatcggctggatcacgccctgcgacttgatcgagtcggccaactcggacagcttgccctcgtccatctcgcggcgcggctggtacttgcccggctgcagctggccgaccggcaacttgcgcagcacttcccccggcagcggctcgatcaccgcggtggtggcctgcacctggctgaccgcgcctttcgggcccaacagcgcatccaggccacggccgaggcctcgcttcttggctgccggcttgctgctggtcatcagacgatctccacggccttgccggccttgttgcgttcgttgttgcggcggatgatctcgccggccaggcccaggtaggccacgccaccgcgcgaggcgcggtcgtagccgacgatgctctggccatggctgggtgcctcggccaggcgcacgttgcgcggcacgatggtgcggaacacgcggtcgccgaagtgctcggtgagctcggccgacactgcgttggccaggttgttgcgcacgtcgaacatggtgcgcagcacgccttcgatctccagcgccgggttcaggctggtgcgcagcgcttcgatggtttccaccagcgcgctcaggccttccagcgcgtagtactcgcactgcatcggcacgatcaccgagtcggcggcggccagcgcgttgagcgtcagcagcgacagcgccggcgggcagtcgatcaggatgtagtcgtactcgtcgcggatcggcgccagcgcgcgcttcaggcgctgctcgcgctcgctctggcccatcagctggatctcggcggcggtcaggtcgatattgccgggcagcaggtcgtaaccctcggcagtctgcacgcgtacatcggcagcgctgttctcgccgagcagcaggtcacaggtggaggcggccagctcgcgtttgtccacgccactgcccatggtcgcgttgccctgcgaatccaggtcgaccaacagcacgcgcttgggtgcgttggccagggaagcggccaggttgacggcggtcgtggtcttgccgacgccacccttctggttggcgatggcgatgatgcgggccatgcgggtgtgcctcgtcgacgtgtgctgggaccggtcattatgcgtacaaccggccccttgcggaaatcgtggatcgccaacccgttgttccacaaggggctggcggcgggaatcaggggcctgtaacagtgaccaggtggcgttcgccggccaggccgggcacgctcaacggggtcacctcacgcacctgccagcccgccggcaggtccgcgatctcctcatgcgggtagacgcccttcatggccagcagtacgccgccggggcgcagcaggtggccaccgacgcggacgatgccggccagggtgtccatcgcgcgcgcggtcagctggtcgtagcggccggcctcgtccagcgcctcggcgcgcgactcggccacgcgggcgttgcccaggccgagctggcgcacggcttcgcgcatgaagcgcgccttcttgccgttgctctcgaccagggtgacctgcaggcccgggcaggcgatcgccagcgggatgccgggcagcccggggccggtgccaaggtcggccaggctgccgtcggccacgaacggctgcatcgccagcgagtcgagcaggtggcgggtgaccatctcctgcgggtcgcggatggcggtgaggttgtaggtgccgttccagcggtgcagcagggccaggtagcgcagcaacggcggcgccagcgcggcgtccaggcccatgctggccaggccctgttccagcgtggcagacacgctggcgggaagtgggtgttcgctcatgccggcattatcgccggttttgcgcgccgattccccgcttcagtgtggataccaggccaatgcggcgcggaactggccgctggcctgccactcgtgcaggtgccagcgtgcggcctcgcccagttccgggtcgcaccagcgcaggtgcagggcgccatcgggcccgggcgccagctgcaggcggtgcaggccgaacgagatgccctgcccatgcgccttcaggatggcctccttgacgcaccacacgcggaagaaccagtgctcgcgcccggcctcatccaggcgttccagccaggccacctcctgcgggtggaagaagcgccgcacgatttccagcaggcgcggtcgcggccgcagcagctccaggtccacgcccagccgcacgccttcgcccagcgccaccagcagcacctcgccgctgtggctccagccggtgccgtagtgggccaacgggccgctcagttccggccggcccttgtcatcgcggaccagcggcagcgtctgcgggtcggcgcccaatgcctgcgccagcacctgccgcgcctgcggttcaccacgctggcccggcacatgcgggtgccgccagaccgtcaccggaccgaagcgccacgggccatcgagggtggctggcaggctcatccgcacacgcccatcacgcaattccacgacgggttcacagccctgcgcgtcaactggtcacagttccccaccggaggttcgatcatgggcatcatcatctggctgatcgtcggcggcatcgtaggctggctggccagcatcatcatgaagcgcgatgcccagcagggcatcatcctcaacatcgtggtcggcatcgtcggcgcgctgatttccggctggctgttcggcggcggcatcaacgaagcgatcaccctccgcaccttcctgttctcgctgatcggtgcggtgatcctgctggcgatcgtcaacctgttcacccgcaagagcatacggtgatctgagggtagtgccggccactggccggcagatgttccagaacgggcccggcaatcttcgggccccgttcgttcaaccgatctgcacccaggccggcgcatggtcactcgggcgttcccaggtgcgcggctcgcggtcgatgcccgaggccaccgcactgcccttcagcgcctctgagaccagggtcaggtcgatgcgcaggcccaggttgcggcggaagccggcggcacggtagtcccaccagctgaaggtacccgcctcgtcgttgtgcaggcggaagccatcgtgcaggcccagctgcagcagcttgttcaatgcgccgcgctcggcggtggaggtcaggatgtggttgtcgttccacaccgccgggtcgtgcacgtcgcgcgcgtccggggcgatgttgaagtcgcccatcacgatcagcttcgggtggcgctgcagttctccggcgatccaggcatgcaccgcttccagccagcgcagcttgtagtcgtacttgtcggtaccgatgtcctggccgttgaccacgtacaggttgatcacccgcaggtcgccgaaggtgccggcgatgacgcgcttctgctcgtcctcgaaaccgggaatgccgatctgcacgtcctgcgccggctcacgcgacagcagcgccacgccgttgtaggtcttctggccggcgaacacgctgcggtagcccgcggcgatcagcgccgaatcggggaacttgtggtcctccagcttggtttcctggatgccgacgatgtccgggccgaagtccttgagccactgctccaggtgcggcaggcggacattgagcgaattgacgttccacgaggcgatcttcatgggggcattctacccgggccagctttggtagacgccaaccttggttggcgccggcaatcaccctgtgccaaccaaggttggcagctaccagaatgggccgcgcgggttggcacccaccggtagtgccggctgctggccggcaaccccttgaaccgtcggcaggaccccgcagttgccggccagcggccggcactaccgaagcagcagcttcaacaaccccgcaatcttcgaatacggcggccgcagccggtcgctggccgcccagcgcgactgccacagcaccggcagccgcttgctcatcgcatcgaacccggcgcggccgtggtacgcgcccatgccgctggcccctaccccgccaaacggcaggccatcggcggcgaagtgcagcagcgtgtcattcaccgtcaccccgccggccaccacctggccaaggatgcgctccaccgtcgccgtgtcgtggctgaagggatacagcgccagcggccggtcgcgggacagcacgtcgcccagcgcggcgtccagatccgggtaggcccgcaccggaaggatcgggccgaagatctcctcgcgcatcaggtccaggtcgtccggcgggtccagcaccacggtcggcaccagcaggcgctcgcggtcggcgcgcgcgtcatccacctgcgccaacggaatcaccggcaccccgcgttgccgcgcctgtgccagatagccctgcaggcgccggtactgaccttcattgatgatgcgggtgtagtcgtcggcatcgctgaagtcgccatagcgctcgcgcacctgctgctgcagcgcctgtacgaattcgcgctggcgaacggtatcgatcagcacgtaatccggcgcgatgcaggtctggcccgcgttgaaccacttgccggtggccagccgcgcagcggctttgtccagcgggaaatcgcgacagacaatcgccggcgacttgccgcccagctccagtgtgaccggtaccagatgctcagcggcggcggccatcaccttgcggccaaccgccgtcgagccggtgaacagcagatggtccagcggcagcgacgacaccgctgcggccacatccgccccaccctgcaccaccgccacccgatcgggcgggaacacgctggccagcagatcggccaggaacgcgctggtgcgcggcgtgtgttcggagggcttgagcagcacgtggttgccggcggcaatcgcggtggccaacggcaccagcgccagcgtgaccgggtagttccacggtgagatcaccccgaccacgcccagcggcgtcggccgcagctgcgcgcgcgccggccacagcttccagccggccgatacgcgctgcggcttcgaccagcgccgcaggtggcgccgcaggtggtcgatggccgacagcacactcatgccatcggccagtttcgattcaacgtgggcgcgatgcccgaagtcctcggcgatggcctgggccatttcgtccaggcgcggcttcaatgcctcgcgcaggcggcgcaggtcggcttcgcgctggtcgagcgtcgggcgctgggcctgccaggcgctgcgcagggtgtgcaggagggcgggaaggtctgccggcgtggtggtggtcatgggccgactatacggggtgctgcgcaacgcaatggtagtgccggccgctggccggcaacggcctgatgtctgctgagattcatgagcttgccggccagcggccggcactaccgtaatgcgcgccggaatgacacggcgcagaaaacagaaaggccgcggtctgcaccgcggcctttccttcactgcatggaacccaccggctacttggtgatatccacgttcttggtctcgcgcaggaacaggccgccgatcaccaccgacatcagtgcgatcgcgatcgggtaccacaggccgtagtacaggttgccggtaccggccaccagcgcgaacgagatcgccggcaggaagccaccgaaccagccgttgccgatgtggtacggcagcgacatcgaggtgtagcggatgcgggtcgggaacagttcgaccaggtaggcggcgatcgggccatagaccatggtcacgtacagcaccagcagccacagcatgaagatggtgccggcgatgttgatgcgggcgccatcggccttggccgggtagccggcggtggtcagggcggtcttcagttccgcaccgaacgcatcggccttggccttgccttcttccttggtcaggccggcggcctcatacgaggtgacgctggcgctgcccacgttcaccatcgccagcgaaccggcggcggcgggctgcacgtcgtacggcacaccggccttggtcagcgcggcggtggccacgtcgcaggagctggtgaacttgcgcaggccgaccggatcgaactggaacgagcaggtagccggatcggccacgaccagggccggcgagctgctgcgggcttcttcgatggccgggttggcgaagtgggtcaggcccttgaagatcgggatgtaggtgatggccgccagcaggcagccggccaggatgatcttcttgcgaccgatgcggtcggacagccagccgaagaagatgaagaacggcgtgcccagtgccagcgcagcggcgatcagcaggtaggaggtggtggcatcgaccttcagcatgctgctgaggaagaacagcgcgtagaactggccgccgtaccagaccaccgcctggccagccgccgcaccgagcaggaccagcagcatcagcttcaggttgccacccttcaggctgtcgcggaacggggtcttggagcccttgccttcagccttcatctgctggaacagcggcgattcgctcagctgcaggcggatccataccgaaatgcccagcagcaggatcgagaccaggaacgggatgcgccagccccaggcttcgaaggcctcgttgcccagcgtcatgcggcaggccaggatgatcagcagcgacaggaacaggcccagcgtggcggtgcactggatgaagctggtgtacaggccgcgcttgtcgtccggcgcgtgctcggccacgtaggtggcggcaccgccgtactcgccgcccatcgccaggccctgggccaggcgcaggatgatcaggatcaccggtgcggcgaaaccgatcgaggcgtagttgggcagcacgccgaccaggaaggtcgagatgcccatgatcaggatggtgaccaggaaggtgtacttgcggccgatgcggtcgccgaggctgccgaagaaggccgcgccgaacggacgcacgaagaagccggcagcgaacgccagcagggcgaagatcatgcctgtggtttcattgacgccactgaagaactgcttggcgatgatggccgcgagcgagccgtacaggaagaagtcataccactcgaagaccgtgccgaggctcgaggcgaagatgactttcttgtggcccttggtcagggtgcccgccgcatggtgcgggcctggtgcagtgctggacataagacgcttcccctccgaagcaatcgttgtgggtgggtgccgaccgttggccggcactcaattcggtaggtgccaaccttggtcggcaccccatctcggtagatgcagaccttggccggcaccccatctcggtaggtgccgaccttggccggcaccccatctcggtaggtgccgaccttggccggcaccccatctcggtaggtgccggccgctggccggcacgctcttagaagctgtacttcgtggtgaactgcaaccgggtgatgtcacccttgttgccgttctccacttcgcggcggccgtacatcagctcggcgccgatatcgaccttgggcagcggcgaatagaagatgttgccgcggatgctctgcacgctcttggtcaccagcgggccgaggatgctgtcgttgtcgtagtcgctgcgcgcgtagatcaggttggtgcgcagcttcggcgagaacgcatgccgccagcccacgtagccggccagcacgccggtcgggttgagctcgtcgcgggccacgtcgtaggcgctgtcggcggtgatgcccaggccgatgtagcgggcgatgccttcgccaccggtcagctggtaatgcagcgaatcgctgtcacccatcacccacttgccgcccagggtcaggccgccagccaccttgtcggccttcgcgccggtggcctggttgtccaccttcaactggcggacgatgccaccgacaccaaaggtgccccagtcgcccttccagccataacgcatggtcaggtcgggcaggctgccacggtcggagttggcgctggcgttggtccaggccccggtgaccgggttgcgggtaccggtgagggtggtggtttccgggttttccagtgcgacgctgaagccgccctgggtatagcgcacctgggcctggcgcacgaagatcacgccgtcggtggggccgacgaagtcgaccgcctccggcagcgcggccgcgtccatgaagttggaccaggtctggccggccatccagttgttccagtacatgtaggcgtggcgcagggtcacgccataggtattggtggcggtctggttgcccagcgagttgccgaagaagtccatctcgaagaacgcaccggccttgttgcccgattcgctcacgttgtcgatgcccaggttgaagcgcgagaacttggcgtgggcgttgaagtcggtgcccgaacgcttgccgctgccgccggcgccttccaccggggtctggcccggcaggtacagcgaacggccggtggcgtcgtcggccagctggccatcgctggtctgggtggccaggaagtcggccttgatgaagccaccgatcttgaccgtggtgccgggcgcggcgcccggagtgatggtggtgacctggatcggctgcttgcccgccggcaccgaggcgaccggcttctgcccggcctgcaccgtgcgcacttcggtcaccgcctgctgggtctggctgatctgggtctgttgttgttgctgcgaagacagcagcagctggacctggcgttccagttcggcaacgcgtgcttccagtgccttctctttggcggtctctgcgaacgccatgcccggtgcgaccagggcgaccaacaggcaggccgccaaaggtgtgcgcacggctttcaacgtacggtggctcatgttgccctctctcccaagtggcaaggtgatgccgcgcgtggggcacggtcgagccgagactgcggggcgttcgcgcacagcggctattggccattggtcgaacccggccctgctgggcgctcactttcgaccatggtctaaccagggtggtgacgcggccgggggtggatggggcaaactgagggggatcggtcgttgcgatgctgcgaccgcacatacaaagtcaacgtgcaagtgagggtgccatggctgatatctaccccgtcgatccgcagttcgccgccaaggcacgcatcgacaagacgtcgtacgaacagcagtaccaggcgtcggtgaccgacccggatggtttctggggcaaggccgccgagcgcctgcaatggatgcgcaagccgacgaagatcaagaacgtcagctatgacctgtccgacttccacatcaagtggttcgaagatggcgagctcaatgccagcgtgaactgcctggatcgccagctggaaacgcgcggcgacaagaccgccctgctgttcgagccggacggcccggatgcaccggcccagcacgtgacctatcgcgagctgtacgagcgcacctgccgcctcggcaacgcgctgcgcaacctcggcgtcaagaagggcgaccgcgtcaccatctacctgccgatgatcgtcgacgccgcggtggccatgctggcctgcgcgcgcatcggtgcgatccactcggtggtgttcggtggcttcgcgccgaactcgatcgccgaccgcgtcagcgactgccagagcaagctgatcatcaccgccgacgagggcctgcgcggtggccgcaggattccgctgaaggccaacgttgatgccgcgctgaagctgccgggcacgaatacggttgaaaccgtgctggtggtgcgccacaccggcggcgcggtggacatgcaggccccgcgcgaccgctggttccacgatgtggtggacagccagccgtccacctgcgaaccggaacgcatgaacgcggaagacccgctgttcatcctctacacctccggttccaccggcaagcccaagggcgtgctgcacaccaccggcggttacctgctgtacgcggcctacacccatgaagcggtgttcgacctgcgcgaagacgacgtctactggtgcaccgccgatgtcggctgggtcaccggccacagctacatcgtgtacgggccgctggccaacggcgcgacctcgctgatgttcgaaggcgtgccgaactacccggacacctcgcgtttctggaacgtcatcgacaagcacaaggtgaccatcttctacaccgccccgaccgccatccgcgcgctgatgcgcgaaggcgaggagccggtgaagaagacgtcgcgcgcgtcgctgcgcctgctcggcagcgtcggcgagccgatcaatccggaagcctggcgctggtactacgaagtggtcggcgacagccgctgcccgatcgtcgatacctggtggcagaccgagaccggcggcatcctgatctcgccgctggccggcgcgatggacctcaagccggggtcggccaccctgcccttcttcggcgtgcagccggcgctggtcaatgccgatggcgaggtccaggacggcccgaccgagggcaacctgatcatccgtgattcctggccgggccagatgcgcacggtgtacggcgaccaccagcgtttcatcgatacctatttccgcacctacccgggcagctacttcaccggcgacggttgccgccgcgacgaagacggctactactggatcactggtcgcgtcgacgacgtgatcaacgtgtccggccaccgcatcggcaccgccgaagtggaaagcgcgctggtctcgcaccccaaggtggccgaagcggccgtggtcggcttcccgcacgacgtgaagggccagggcatctacgcctacgtgacgctggtggccgaagaggcgccgagcgacgagctgcagaaggaactggtcgcctgggtgcgcaaggagatcggcccgatcgccacgccggaccacctgcagtgggcgccgggcctgccgaagacccgctcgggcaagatcatgcgccgcatcctgcgcaagatcgccgagaacgcgccggaccagctcggcgatacctcgaccctggccgacccatcggtggtggcctcgctggtggacgagcgcaaggtgcgctgacgtacgacccggggccggatcccggggccggatcccgttccgccaggaacgggctctgaccgccgtaggatctggccccatgcagtttccccccacggttccccccgaccatgaccaccctcctgattgccgatgaccacccgctgttccgcgaagccctgcgtggggccgtgcagcgggtcatccccggcgtgcagctgttcgaggccgacagcgtggaagcgctgtatgcactggccgaccagcacaacgacgccgacctggtcctgatggacctcaacatgcccggtgcgcagggtttcaacgcgctggtgcacatgcgctcgctgcacccgcacctgccggtggtggtggtgtccgcacgcgaagaagccacggtgatgcgccgcgcgctcgaccacggcgcgctgggcttcattccgaagtctgcggactcggacaccatcggccacgcactgggcaccatcctcgatggcgagacctgggcaccgccggaagcgcacaacgtgccgcccaccggcagcgaagaacgcgaagtcggccagcgcctgcgcgagctgaccccgcagcagttccgcgtgctgcagatgctgggcgccggccgcttgaacaagcagatcgcctacgacctcaatgtctccgaagcgacgatcaaggcccacgtcaccgccatcctgcgcaagctgggcgtgaccaaccgcacccaggccgtgctgatggccggcaagctggcgatcgacgacgacgccatcgtgctgccgccggaagaagattgatcgtaacggactgcggagccgagcatgtgctcggctccgcagccttcatgatgcccctgtagagccgagcccatgctcggctgctcttggcctcaataccgattacccccaaagccgccatcgactccatacataggggtattccccgatgcgcgtggccagcccagcacgcacgggattggctgcaatgtacatcgcctgcgtgcgcaggcactcgtcgctgcgcaacgcatggtcgtagtaccccggctgccagatcggtgcgttcgcatcaacgcgcctggcgatggatcttccactccgggacttcaggatctgcatgcagccggccagcgttccggtacgcaactcgaccaaccaatgcaggtggtccggcatgaccacctaggcgagggaggaggtccgccccgtccgctctacggtgcgcagcgcttcgatcagcagatcgacattggccttgtcgtcgaaccagggacggcgtgcgcgtgtcacagccgtgatcgcgtagacattgccggtctgcgaccagcgaccaaagcggagtgcgggactggccatgcgaagaggctatggcacgcatgacagcctctccatcagcgaaatgccgtgctgcatgtcggcgaatgctccaatgtagagccgagcccacgctcggctgccatgtgaagcagccgagcatgggctcggctctacaggggcgggcgttaccccacgccgtgcaggtgttcgtacaggatcgttgcgccgatgatcaccaggatcacgccaccgatgatctccgcacgcttgccgaccatgctgcccagtacgcggccgagcatgatgccgacggtgaccatggtcagcgtgcacaggccgatgaccgcggccatcacgccgatatgcacgtccatgaaggccagaccgatgcccaccgccatcgcgtcgatgctggtggcgaaaccggtcagcgccagcttccagaagccgtggtgctgcgaggggtcttcgtcttcctcggcactgtccgggcgcaggccgttgtagatcatgtggatgcccagtgcgccgagcaggccgaaggcgatccagtggtcgaaggcttcgacgtattgcagggcagcccgaccgagcagccagccgatgatgggcgtgatcgcctcgatgacgccgaagatgatgccggcacgcaatgcatcgcggaacaccggcttgcgcatggccgcacccttgccgattgcagcggcgaaggcatcggtggacatggcaaagccgatcaggaggatcgaaatgggggacatgggcggtggctgaggtcgggctgggacggacgcacggcctgcgctcgcgcccaacctgacgttgcgcgcgcgggccgctggtctcgccaaccatcatggttgtccacgccacggcgcactggccgagtatgttgacgtggacgattcctgcgaaggaatccggctactccccaaggggacgcgaagcttagcatcgcgatccgcacgtggcgcatttccagcgaaacgcgcaggcagggctggtttgtatagcgatggctatatcggcgccgccatgcgttcgggagccgagcatgggctcggctctacaattgccaatcaggcatcgctattgccggcatcgcgcagcgcgcccaggaaggcgcgcagcgaggccggcttgatcggcttggtcagcacgcggtagccgcgttcgcgtgccatccgcttcagttcgtcgcggccatcggcggtcaacaacgcacccggcagcggataaccggcggcttcacgcagcgccaccagcgcatccaggccgtccatgcggtcgtgcaggtggtagtccaccagcatcacctgcggccgctcggccactttctccagcgcctgatccaccgtcgatgccgtaatcacctgcacctgccagcgaccgagcagcgcgcgcatgccgtcgaggatctcttcgtcgttgtctacgcacagcacgcgcaggccggccagcgaatcgctgcgcagcggcgcggctgcggcctgtaccggcgcggccagttcggtatagcccggcagcggcgccacccgcggcaggatgatcgagaacatcgagcccttgccaacccggctgcgcgcattgaggcgatggtcaagcaggcgcgagatgcgctggcagatcgacaggcccaggcccaacccttgttcgccccaatcgaacggctgctggtagcggtggaactcgtcgaagatctgccgcatgtggtgctcgggaatgcccgggccggtatcccatacctgcagctccacttcgttgccacgctggcgcaccgccagcacgatgcggccctggcgggtgtagcgcagcgcattggccaggaagttctgcagcacgcggcgcagcaggcggcgatcactgcgcacccaggccggacgcgtgaacaggtccaggcgcaggccacggccggcggcgaccggcgtgtactgcgcggccagttcgcgcatcagcgcgctcacgtcgaactcgccgatcaccgggtgcaggccaccggcatccagccgcgacacgtccagcaggccatcaagcagttcttcggcagcacgcagcgacgcatccacgcgctcggccaggtgcttctgctcgtcgctcacatggtcgctgtcgcgcagcgccgaagcaaacagccgtgcggcgttcaacggctgcagcacgtcatggctgatcgccgccaggaagcgggtcttcgactgctgcgcgacctcggcctcgtgcgagcgctcggccacgcgctgttccagcgtctcgttggcctccagcagtgctttttccgcgtgcttgtagtcggtgatgtcgttgtagctggtcacgtaaccgccgccgggcagcgcctggccgcgcatctcgatcaccttgccgtcgctgcgggtgcgctcgaacacgtgcggtgagccggcgcgcatgtagccgatgcggcggttgatttgcacttcgatatcgccctcgcccagctcgccgcgctcggcgttgtagcggatcaggtcggccaccgggcggcccacgtagagcatgccgtcggggtagccgaacatgtcctggtagcggcggttccatgcggtcaggcgcatgtccggatcaaccacgctgaccccggcgctgatgttctccagcgtggtcgacaggatctcgcggttgaagcgcagctcctgccccgcttcgtccagcaccgccaccacttcgcccaggtccatgcccgagccacgcaacaggctggtcagcagcaggcgcgccgatgccgcgccgatcgaggccgccaacagacgctcggtgaactgtacccacggccggtccgcaggcgccgaggattgcagctcgcgtcccagcgactgcgcctgctcgaagaacgaacgccgcgcgtggcgctcgccgaccacgcgcgaggccagtgccagcaggtcgcccacgtgcacgtggccgggccagccgccggccaccgacgggcgttcggcatacgggtcgaggaagggggcagcgcgcaggcgctcgtcgacgccgggtcgccagcgtgcggacaccagcatcatcgtcgccgcattgaccagcagcgaccagaacgtgccatgggtcagcggatcccagccggtcatgccgaacagctgctgcgggcgcagccactcgatgccgaacgggccgtgctgcacccaggcggcatcgacccagccggccatggtcatcgccggcaacagcagggtgtacagccaggtggcgaagccgagcagcatgcccacctcgacgccacgccggctggcaccgcgccagtacaggccgccgatcaggccgggcgcgaactgcgccaccgctgcgaacgccatcaggccgtacgaggccagggtgctgtcgttgctgctggtgcggtagtagctgtaggccatcaacgccagcagcaggatcgccaggcggcggatccacagcacgcgcgaggcgacgtcggcggcctcctggtggtcaccgctccgacgcagcagcaccggcatcaccaggtcgttgctgaccatggtagccagcgcgatggacgacacgatgaccatgccggtggccgccgaaaagccgcccacgtaggcgatcagcgccagcgcattgcggccctcggccagcggcagggccagcaccatcgagtcgtcggcgacgctgccgccggtgccgaacagggtcacgccggcggtggcgatcggcagcaccatgcccgagatcagtaccaggtagccgccgaacatccagcgcgcgcggcgcacgtcgcgcacatcgccgcactcgaccacggccacgtggaactggcgcggcaggcagatgatggccaggaaactgagcagcgtctgcgagatgaagcccaccggcggcaggccggtgaacagcgtatgcaccgactcgaccaccgcgtcggtgcggttgctcagccacaggtaggcgaacacgcccacggccagcatcgccagcagcttgatcaccgattcgaaggcgatggccagcatcatgccgtggtggtgttcggtggcatcgacctggcgggtaccgaacagggtggcgaacagcgccatcagcagcgccacgtacagcgcgggatcggtgaagaagccggtcgggccggtgttgccggtcagcacctgcaggctcatcgccaccgctttgtactgcagcgccaggtacggaatgatgccgatcagcgcgatgatcgccaccagcgccgccagccgccgcgagcgaccgaagcgcgaggagatgaagtcggcgatggagaccacgttctggctgcgcgcgatcagcgccaggcgctcgatgatgcgccagccgaacagcagcagcagcagcgggccgatgtagatgggcaggtagcccacgccgttgcgcacggcggtgccgaccgcgccgtagaaggtccacgacgagcagtacacggccagtgccaggctgtagaccaccggccgcagccacggccggtcggggtacatcggccgacggtcgccccaccacgccacgccgaacagcagcgcggcataggcaaccgagaccagcagcaggatccagctggagaccacgcgtgcgtttccgtcaggacaggggtcagtagatcacgaccgctggtcgtgcgggtaggtcacgaggaaggaccgcaagggtggggcatggcagtaggtcacgatcgttgatccgtctggtgggtcacgactgttggtcgtgacggggacatccgtgcccactaacagtgggcacctaccgcgaatcaatgggcacccaccaggaagcggtgggcgcctgccaggtaccggcgttattgggccggcacgcccatttccttcagcagctcgggcgccgggtagaccttggccagcagccagcgcaggtagcgcatgtccacgtgcacggcgcgcttgtagcgcgggtcgaaccaccagctggcgctgaccgactcccagttgctgtcgaagttcaggccgatcagttcgcccctggcgttgagcaccggcgagccggagttgccgcccgtggtgtccaggttggtcaggaagttgaccgtctgggtcttcagtgccggatcggcggtgctgccgaagtcacccttggcgatcgctgccagcaacggcttgggtgcatcgaacgggtaggcgttggtgttcttctcgacgatgccggccacggtggtcaccggcgagtaggtcacgccatcgcgcgggtgcagcgcctcgaccttgccgtagctgatgcgcagggtgcggttggcatccggatacaccgcgcggccctccctggcacgccaggcgaacagcgcctgcatgtacgccgggcgcaggcgcagctgctcgccttcgcgggtcttgctctcgttctcgatgcgcagctgcgcggccaccagcggaccggccacgctgatcagcggatcggcggccagtgccttgccttcgcgtgcggcggcaaagcgcgacaggcgctgcgcttcctcacccagctgggtaccggcatacagggtgtccagcgccttggccagctgctgtggggtacgaccaaaggccgcgtcgaactcggccacgcgctgcgcgtccggcagctgctggtagcgggtcagcagggtggtcagcagggccttctcgacctccggcgcgtaacggcgctggacctgcttgagcaccccttcgatcatcgcctggtcgcgctgctggtagccgctctcgcgctgcgcgtccggcttggccgattcgatgcgcaggcgctccagcagcagcgccgagcgcagcagctggctctgcgcggccatctgctccaggagcaggtcacgctcgcccaccgccgcaccctgcgacaggttggccagcagcgccttgatgtcaccctggtacctgcggtcggtggcagccagcatggccgtctcgtcggcggcacgctgggccttcgcatcgctgcgcagcaggccttccagttcgccggcggcgcgcttgcggttgttcttcagcgactgcagctgcgaggcgtagcgggtacgcgcctgcgcgtccttggcgctggcggtctcgatggtgtcgatcatctgctggaacaccgatacgcggcgcggcagcacggtatcgatctggccggcgaattcggccgcggtgcggtggcggtaggtgatgcccgggtaaccggccagcatcgcgtaatcgccttccttcgggccttccaccgacatctgcaggtgtgccggcgccttgtagggcacgttgtccttgctgtaggcggccggcttgccgtccttgcccacgtaggcgcgcagcagggtgaagtcgccggtgtggcgcggccacatgaagttgtcgatctcatcgccgtagttgccgatcgcacgcggcggcgcatacaccaggcgcacgtcgctcagttccagctgggcaatgcggtagaaatcggtgccgtagtacatgttggccaccgagcagcgcacgctgccgtccttctcgcactcggccacgatctgcttgctggctgcatccacggcatcgaagtaggcacggccggtcttgccacgggcctgcgccagcacctggtcggtcaccttgtcgaagccgacggtgaccagcacgcggaagtccgggttggccgggcgctcgtcggcacggtccctggcgatgaagccaccagcgatcaggtcgtgctcgggcgagctgttgtactggatcacgcccatcgccacgtggtggttggtcagcagcaggccgtcggcggacacgaacgaaccggtgccgccaccggcgcgcaccacggcgctcagcggcggcgcggtgacgttggccaggtcggccggattgcccttgaagccagcggcctgcagcggttgggccaggtccggcagctgcgtcggcatccacatgccttcatcggcgtgggcgccggtggcgagggtcaggcccagggccagggcggtggggagggctttgcgtggtgacatgaggcaatccggtacgacagaacagcccgggaccatagcccgtggggcgctgtcgggcaacgcccgatagtcaggcctgcgccgcgctcctagaattgccgttttctgcacatcggacgttcgcagatgatcgtcggcatcgatcttggcaccacccattccctcatcggcaggcacacggcagcagggccgcagctgttccccaatgcccatggcgagctgttgaccccttcggtggtcagcctcgtcgatggtgccgtactggtcggccagccggcccgtgaccgcctggtcagccatccgcagcagaccgtggcccatttcaagcgctggatgggcagcgaccgtgagacccggctgggtgagcgcagtttccgtcccgaggagctctcggccatggtgctgcgctcgctgctggccgacgccgaagccgccctgggccacaaggtggaggaagcggtgatcagcgtgccggcctacttctccgacgcccagcgcaaggccacccgggccgccggcgaactggccggcatccgcgtcgagcgcctgatcaatgaacccacggccgctgcgctggcctatggtctgcaggagcgtgacggcgaaggccgcgtgctggtgctggacctgggcggcggcaccttcgacgtctccatcctggaactgttcgatggcgtggtcgaagtgcatgccagcgccggcgacaatttcctgggcggcgaggatttcctgcaggtactcgtgcaggccttccacgccgaccagggcacgtccgccagcgacctgtccgctgccgagcaggcgcagctgctgcgtcggctggaactgttcaagcgcgaactcagccagagcggcactgccagcctgcagttgcccctggccggcagcgaacgccagtggcagctggatgaagctcgctacgcccagctctgcgagccactgctgctgcgcatgcgcgcgcccatcgagcgcgcgatccgcgacgcccggctcaagcccgaggcgctggacgacatcatcctggtcggcggtgcggtacgcatgccgatggtcagcaggcttgcgacccgcatgttcggccggctgccgctgcgccatgtccatccggaccaggcgattgccttgggtgccgccgttgcagcgggattgaaggcgcgcgacgaatcgctgcgcgaagtcgtgctgaccgatgtctgcccctacacgcttggcacgcaggtgtcccgcccggatgctgccggtggcgagcgtagcggctatttccacccgatcatccagcgcaacagcgtggtgccggtcagccgcgaggatcgcttctacccgctgcacgagcggcaaagtgccatccgcatcgacgtgttccagggcgagagcccgacggtggatcgcaacatcaagctcggtgagctgaccgtgccgctgacccattctgtcccgatgcaggaacgcagcgtcaccgcccgcttcacctacgacgtgaacgggctgctgcaggtcgaagtcaccgaggatgccaccggcaggcgccacgagctcatcctggaacagaatcccgggctgctgtcacccgaagagatccagcagcgcctgcgcgcgctggaagcgctgaagatccacccgcgtgacgcccagcccaacctcgcggtgatcgcccgcaccgagcgcctgtacgaggaacgcatccatcaccgtgaacagttgcagtcgtggctgagcagcttccgccatgtgctggagagccaggatgccgttgccgtcgagcgtcatcgccgtcagctggacgaggcactcgacgccctcgagcgcgatgcatgagctgggcactgcacgtcctggagctggaccaaacggctgacgagcgcgcggtcaagcgcgcctatgcaaagcgcctgcgggtgacgcgccccgacgaggatcccatcgccttccagcacctgcatgaggcctatcaggcggcattggactgggtccgccaggaagcgctggccgatatcgcggacgaagacgaaccggcggagcatgcaaccgacatcgcaccctggccgcccgacgcagacgtggcatgggcgccgcccgaaacgcgttcgtactcgcctccatggccacctcgcggcacgcctgtgctgctgcgcacggcaccagtggcggaactggagggagcggtccacgtatcgggccatgcgcacacgatcctgcgcatggcccatctgtcttcccctgaagacttcggcccctggctggaggccacgccggtgctgtggtcgctgcgctacaagccattggtgggcgacgcgctgctggatgaactggcacgcagtcacaacagcgtcagcgcagccaacatgggtctgctggcacgctgctttggctgggatgatgtacacgatggcgtggatccggacaggctggcatcgatccagtcgcgcggtcatcgacgctgggccgccgagaccggcaatgcggcagagctgtcggcactgcttgaacaagagggcagcctgcggctggggagggtcacccttgcgcgttgcctgcgctacctgtcgcagccatggcacgcgcgacgatccctctggcaggcgcagctgcccgagcacatcattgaggtcaacgcgctgctggatgcgctggaacgcggcggccaggagccattgcccgccgcctgggatcggcagcaggtgcagttctggcgcagccttgccgacgtttcccgtcccaaccgctggcgttgccaggtcaatgcgctgcggggcggcctgttggctgccctgacgctcgcgattgccggtggctcgactctcatgagtcttgcccagcgtgacctgcgcaccgccgccgcgctcggcataggcggcgtgctgctcggggtcctgctcgccctggccggcgctctgtgggtccatgtccgttgggcgctgcgccagctgacgctggatctgcccccttcgcgctggggatggctgctggcgttgccagcgccgctgatcgccctcgccagcctgatcctggtccatggcctggatctgcggctggaaggtacgttgctgctgttccctggccttgctctggcgacggcacgctggatccggcgcgaggatggccggggattccggccgcgcaacctgattggaccgggcatcggcatgttcgtccccgaagtgggctgcgccctggtcctgctgctatggaccacctggttcctgcgtgacaggtgccgtcgcctgtcgatcgacctgcctccacctgcttctggaaacaccgtgtgaaccgggcactggacgctctcgggctcgacgccagcgccgacgaaaaggcgatcaagcgcgcctacgcgcagagactgcgcgcggcacgcccggacgaagacccggtggcattccaggcgctgcacgaggcttaccagcaggccctgctgtgggcacgcagccgcacgcaatggcaggaggaaagcagtgcagaagcgctgtcgacgccacctgcagacaacagcccacccggcccaccggcgccgtacgacagccattcgccgatggaccacatgccggtgctgcatcatccatgcacgcccgacaccgacatgccggacgatgtggtggagccatcattgaacctgccccggtttgcgcgcctgctgatcaacaccgccggcgacgccgacccggccagcttcgagcactggctggcccatcgcccggagctgtggtcattggccgacaggccgcgtatcggtgacgtggtactgcagcagctgctgcaccagggccagccgctgtgcgagtccaacttcgatctgctgggtcgatacttctgctgggatgagatccgggctgatatcgatccctaccgggtccgcgcacggcgcaacctgctgcatcgccgctggcagctgcagccgcgcaaccacacggccctcaccgcagccctggaccgaccgcatgaccgggtgtccgtaaccgaggcccatgcccgcatggaacgcttgacccgaccgtggcactggctgcaatcgctgctgtcggccagcgtgcccgggcgtgctggcatcatgcggcaaacgatgcagcgtctgggagtgcagggtgtccgtgacacgctggcgccactggacacggatcaggtcgccttctggatggcggtatcccaacccgggcacttcaatctcatgaagatgcaggtggccattgtccgctgcctgctgggcgctctcgtcgtgctggccgttctggcagcgctggcattgctcggtgatgccgctcgccctatcgcgatcagcacgtccagcatgaaacacgtggcaatccatgcctcggtggtcatcgtgtctggcgtcctcatgctgacgcctttcgttggaggcaccccatcgcggacggcgtccgcgccagcgcccgtcgagccaccgtcggcgcttgatgggcacggcatgctcacgcacgggcctcgtccgcgcaggccagccccctgcttcgccgttgtcagccagaccgatcccgacacagagggtggttgaggggcagcgggttatttctcccgccgccagttgatcgacccgcggttttccacggtgctcgactccacttccacgtcgaacccgcggcgcagcaggtacttcagcgtgatcaccgaaccggcaccgaccagcgacacgccgtagccgacgtacagcttgggcgagatgtacttgccgacaccgatcaccgagccgcccagcgcgcgcgactggctcacgccggcgtcgtccaggcccagcttggcgcccagctgcgaagccagcaggccgctgcccgccgagagcgccgccgaggccgcgttgacctgctgcgcctggtcgctgctggcaccggtcaggctgcgtcccagcaccagataggccagtgcctcggactgcgacattgccggatcggaccacacgtccgcgcgcggctgctgcgcacgcccggtcacgtcgatgccggcggtgacatcaccgatccggcgctcggcgcggatgttgatgcgcgggtcggacaccgcgttgtagttccaggtgaggttgccgcgggtgatggtcaggtcctgcccatacgccttgtagcggccgctcacttccaggccgccattggcggtcatttcacggccgggcttggcccagacctgcatcttgccggtcagcgcgcccttcaggccgaacccggtcatcttcaccttgtcgccgaggctgaccgtcaggtccatgtccagcggcgaggtgcgcgactcttccggatcggccgggtccagcaccaccacgtcttcggacaccgaggtgccacggtccaggcgctccaggtcgatgtcggcctcgggcacgtgcacggtgccacgcagctccatcgccgccttggccaacgtgaagtcgaggttggggttggcgacgatgcgcagctcgctggtgttggacagcagcacgttctcgccgtggatcttcagctgcagcggctgtgcatcaccgaaccacgacaggccgccgtcgacatacagcgtgccctggcccgagttggcctgcgcggtgatcttggccgagccgtcgggctgggccacgaagctgcccttgccctggtcgaaggtcaggccaagcgcggggaattcgcccttgaagttgctcagctgcgcgtcgccgcccagcgacggctgcccgcgcgtaccgcgcaggctgacgtggccttcgatcaagccggtcgggcgcacgatgtccggcgagaacagctccagccagtacagccgcgacatgttgaggtagagctcaccgttcagcggtgcgctggcttcccagccggtctgcatcttcgcgtcgacgaagccattgccctggaagcccatgcccaggtagcccttgatgctggccggggtcatgtcgagcttcagcgagaactggtcatagcgcaccagctcgccgcgggtggtatcgcccacggtgttgcggttctcgcccaggcgcacgccgccttccttcgagcgcacttccacatggccttcccaggccgcgccgcgcgggcggatctgcgcgtccaggctgacgtcgccgcgcaggtagatgcggcggccggactgcggcggcagccacggctgcaccagcgccagcggcagcgcgtcactgcgcaccaccaggccttctcgcggccagttggcctgtgcgcacagcgcgccgctgctggcggcggccaggcaggcttcggacagggtgtaggtgctgccgttgatcgcgaacgccgccggtgcacgcagcgaccacgcatcacccttcaccggtgcgatgcgcagcgaggccagctcgccacgccactgcgccccctgctggcgcacgctgccctgcagctcgatcgcgcccatctcgttgcgggtctgcgcagccaggcgcaggttggacacactgccctgcgcatccacgttcaagcgctccagcagcatgccggcgttgacctgctggccctgcaccgccagcgtgccgctgtcgccgcgccacggcaggtggcccttgatgctcacgctctcggcgccgtagccctcccagttgagattgttgccgaccaggtcggcggtgatgtccggcgcatcgcgcggccccttcacctgcacctggccgcgcaggccaccgtcggcgcccggcagcaggtcactcagctgcagcggttcgaaacgtgcatcgatgtcgaggcggtcgccgaccttgcccgacgcggtcacccggctgctgcccagcgacagcttcaggtcaccctggccctgcgcgccctgcagcgcgaacttgccctgtgcatcaaggttgcgctggcgcaggatgcccttcagcgacggcaggtcgacggtggcttccagcgtgccggccgtgcccggtgcggcattggccggcggcggcagctgacggcccttggaggccaggttgccggacaggcggccgttccagcccggcacgaaatagccggggtcgaagtccttcagcgtggccttggcgtcccagtccagctgcggcgcccaggccacctggccttccacctgcagctgcccacccggcgtctgcgcctgcagctggtggatcgacgcggcctggtcattgccgcgtacgtcgaactgcagctgcgccttctgcgcctcgcgttcgatctcggcacggccgatcgcggcccaggccttcagggtaccggccaggccgaagcgtgcttccttcagggtgaccggcaccggtgcgctgccagccgtgttcgggtcgggtgccggcacgtaggtcagatcgcgtgcgaccaccgagaaattgagtttctgctgatcgtcctggctgaagtcggcggtgccttccagccgcgcttcgccaccgaggcccttcaccagcagcggtgagaccttcagcacctggtcctgcagcgacaccaccgacggtgccagttccagctcctggtcgccctgcttcaccctgccgcgcaggttggcattgccgcccttgccggcggcggtgaagtccagcgacaacggcgcaatcgccgagctcgccaatgctggcgacaacagcgccagatccagctcgtcactgcggatgctggcgctccagctcgggtcggtgcggccatcgaacaccagcatcgcgtgcagcggcttcggcgcgcgcccggctacggccacttccatgtgcgacaggtcgccacgtgcgaccaggcccaccgtagcggcggtgcgcccacgcggtgctggcagcaccgccgtcaccgtcacatcggtgtcgtagtccttggccggaatgtaacggccctgggcggtgaagttgcccatgtcgctgtccaccaccagcttgtgcgcctggaactcgccattggcgatctcgatgccaccacgcacccggctgatgtcgatcaccggttcgttggcctggctgatgcggaagccgtcgatggcgatggcatcggcctggatcgccagcggcatctcgatctgcggcagcgaatccggccacgatggcagcttgaacggctcatcactcttggccaggttcaacgtcgcgttggtcagctccagcttgtccagcagcagcttgcggcccagcagcgggcgcaggtccggctccaggtgcgcgcgctcggcgtggaaatggatgtcgtcgtagcggaagtcgacgttgtacagggtcagcggaccggccaccgggccttccaccttgtcccaggtgaagctggcgcccaccggcagtcgcgccaccacctgggccagcagcacatcgcggccggccacggtctgcagcagccagtacaccgccagcagggccagcagcaccacgccgatcacgccgacgccggaccaggcccagaagcggcggcgtcggtagaagcgcacgcgcggcggtggcgtgccggggctcggtgcgggcgtgctcacaggtccgctccgatgttgaggtaaagctggaactgtgaatccgggttgttcaggccatgcgcgatatccacccgcaccgggcccaccggcgatttccagcgcacgccgaagccgacgccggtgtgcaggtcaatggtgttgtcgaatgcgctgccggtatcgacgaacaccgccgcgccccacgggccgccattgaagtagtgctcgtactcggccgagccgatcaccaggttcttggcgcccagcgcgtatttgtcgggtttgggtgtgcgcgggccgacttcgcggtaggcgtaaccgcggatgctgcggtcaccgccggcgaagtagcgcaggctcggcggcatcgccaccagatcgctggtccaggtggtacccccctcaccgcgcaggatcaggcggttgctttcacccaccgggatgtaccagcgcagcacggcgttggcctgcacgaagctggtgtccgagccggcaccttcaacgccggcgcgcattgtcgcagtaccgctgatgcccttgcgcgggaacatctcgtcgtcgacgttgacgtagtcggcaaccatctgcgggtacaccagcgtcgaggtgttgtagacggcatcggtgaattcagtgccggaggcatagcgccaacgctcgcgcagtgcgttgatcgaggcgatcgcggtccagtgctcgttgatctcgccgctgcggctggcgatcagcttgaagttgcgcaggtcgatgtaatcggtctgctcgtcatacgcactggcggcgaaggtgtaccagccgtcaagccagttgaaggcggggatgcggtaactggtcaccagactcttgcgcttctgcgcatagtccagctgcgtgttcatcttgtggccgcggttgttcaggaagcgccgctcgatgccaccgcgtacacccgggccgctctcgctgccgtagctcaggccggcggtatagatggtgcgcttggcgcgcgtcagcttcacgtccaccggcacttcgccgttctcgtcggcctggtccgggcgcggctggatgtcgatcacgctgaagtagtccagcttggtcagcgactcgcgcagccggtccagcttgccctcgtggtagtagctgccctggtcccagtagaccagtggatcgaacagcttgtcgacgaagtagtcctgctggaagcgcaccgggcccatgttgtagcggcggccgctgtcccaggtcaggtcgatgtcggcggcgttgtcggcgcgggtgatctgcacctggcgctgggtgtagtcggcgtcgaagtagccgcgctcggccaggcgccgggtgatggtgatcttgctggcttcgtactgggtgtgctcgaagcgctggcccttgcgcggcttgaacgcggccaggtcatcctgcaggtactggtcgtacatcgccgggccggtgatgtcgatgtgctcgcggcgcacggtcaccggggtgcccttgtcgacatggatcagcacgcgcacgtgttcgtcctcgcgcggtgcctcgaccttgatcaccgggttgtagtacccgaacggttccagtgcctggcgggtctgccgctcggcctgtgacagcaggtactccaggcgtgattcgccctgttccttgccgatcgtgtcgtacagcgacagcgattcctggatgttctcgatgattgcggcgtcgtcgcccttgtccaatcccttgatgtccaccttgtcgatggtgccgcgcgcgtggaccacggaagtggcggccaacgacaggaccatcagcggcagggcgtatttctttggctgcatgcgggacagcataccgaccgaaggtgacgatgcgaaatgcatcacgtcattcgggatcggttgttaagtggcggtcaaaatacgcacctttgtggcgatcatcgtgaatgcaggcgaggatgccggcatcgtgcgcgatgccggcaatgaccccgatggacatccaccggcgatgcgatgcgcgggggtaatgccggccagcggccggcactaccgatacgggcatcagctcgacagatgctcgatcgccgcgaccttgcccaggcgctcgcccagcatcgtcagcagcgccaggcggttgccacgcagcgccagatcgtccgcattgaccatcaccccgtcgaagaacgcgtcgacctgcgggcgcaggcgcgccaggcgtgccagcacggccacgtagtccttctggtgcaggctggcgccggtgtcgtcgatggcggcggtgaccgcttcggccagcgcgcgctcggcgtcttcctgcagcagcgccgggtcgatctgcgccggaatgtcgccctcggccttgcgcaggatgttgcggatgcgcttgttggccgcagccagtgcttcggcttccggcagtgcggcgaaggtgccgatcgcatccaggcggcggtcgaagtcgtacagcgaggccggcttcagttcggccaccgcgttgaagtgcgtggccggcacgcccttgtcgccgtaatagcccttcaggcggtcgagaatgaagtcgtacagctcgccgacatcggcctgcacgttgcgcgcggccaggccggcgttggcgctggccagcagcgcgcgcaggtccagctcgaagccgctttcgatgatcgtgcgggccaggcccagcgcattgcggcgcagcgcgaacgggtccttgttgccggtcggcttcaggcccgcggcgaaaccaccggccagcgtgtcgacgcgttcggcgatggccagcaccttgcccagcggcgacagcgcgatgtcatcaccgccgaagcgcggctggtaggcctcgtcgatggccagcgccacctcggtcgattcgccaccggccacggcgtagtggcggccggcgatgccctgcagctccgggaactcgttgaccatgcgcgactgcaggtcgttcttggccaattcggcagcccgcctggcctgcacggcatcggcacccacctggggtgcgatcacttcggccagggcggccacgcgcgccaccttgtcggccacgctgcccagcttggcctggtaggtcaccgtcttcaggccgtcgcccatcgacgccaggccctgcttcaggtcctcgtcgaagaagaacttggcgtcggcgaagcgcgggcggatcacccgctcgtagcccttggccacttcggccacgtccttcgattcgatgttggcgatgccgatgaacttctcggtcagcgtgcctgcggcatccagcaccgggaagaacttctggttgatctccatcgtttcgatcagcgcttcctgcggcactgccaggaacgcacgttcgaagctgcacagcaccgccgacggccactcgaccaggttcaccacctgctccaggttgtcgtcggtgatgcgggcgctgccaccggccctggccgcggcggcctcgacctcggcgacgatgcgcgcacggcgctcgcgcgggtcgaccagcacgaaggcggcgcgcaaggcttcaacatagtcctgcggctgggccagcgacacgggctggtcgtggtggaagcgatggccacggctgacacggccggcctgcaggccgaacagttcggcctccaccacctcggtaccgtgcagcagcaccagccagtgcgccgggcgggcaaagccccaggtgtggccgccccagcgcatcggcttgggaatcggcatcgctgcaatcgcctcgcgcaggatctccggcagcaggctggcggtgcgtgcgcccggggtcaccgcgcggtgcacgaagcgctcacccttgttatcggtggtcttctccagcgcggtccagtcgatcccggccttggcggcgaagccctgcaacgccttggtcggctggccttcggcgtccagtgcgatgttcaggtacgggcccagcacttcgctgtgctgttccggctgttccaggcccacgcccggcagcagcacggccaggcggcgcggggtcgacagcgggcgtgcatcactcagttccagcgcgacgccgcgcgtgcgcaggccttcgacaacaccgtcgaagaacgcctgggccaggcccggcagcgccttgaccggcagctcctcggtgcccagttcgatcagcaggggggacagttggctcatcggttcgatcctgtggtgggggcgcagcgcgcgacgcgtccggcgccccaggtagttgatgaaaagcgggtgggtgccgacggcccgtcaggccttcttcgcgcccgggaagcccagcttctcgcgctgctcgtagtacgccttggccaccgcctgggccagcgcgcgcacgcgcaggatgtagcgctggcgctcggtcacgctgatcgcgcggcgtgcatcgagcaggttgaaggtgtggctggccttcatcacctgctcgtaggccggcagcggcaggcccacctcgaccagcttctgcgcttcacgctcgcaggcatcgaagcggtggaacatttcgtccacgtcggcgtattcgaagttgtaggtgctctgctcgacttcgttctggtggtagacgtcgccataggtcaccggttgcccgtccgggccgtaggtccagaccaggtcgtagacgttgtcgcagttctgcaggtacatgcacaggcgttcgagaccgtaggtgatctcgcccagcaccgggcggcactccaggccaccggcctgctggaagtaggtgaactgggtcacttccatgccgttgagccagacttcccagcccaggccccaggcgcccagcgtcggcgattcccagttgtcctcgacgaaacgcaggtcgtgcaccagcgggtcgatgcccagcgccttcagcgaatccaggtacagctgctggatgttgtccggcgccggcttcatcgccacctggtactggtagtagcgctgcaggcggttcgggttctcgccgtagcggccatcggtcgggcggcgcgacggctgcacgtaggccgcgttccagcgttccggaccgatcgcacgcaggaaggtggccgggtggaaggtaccggcgcccacctccaggtcgagcggctggatgagcacgcagccctgctgggcccagaactggttcagggtctggatcaggccctggaaggtgatcggaacggtcggggtcgcggacatgcgtacgagtcttggccggcaagggggtgcgttagtataacggccgacctgcggggcattccgtacccgggaggagcaggcagatggaacatcggctgccggtgggcacgcccggcgagccaggcgacatcccgctgccgtggggccgcctgcatttcgaacaggtctgcgcagcgctgctggccgatggcctggtggccgagcacgatgtcgagcgcatgcggttttccgcacagggagcgcgcaatgccagtgaagtgcacccgctggtgttgctgtccaacctcaagctggccgcccgcgacggtggcgaactgaccctggaacgcctgaccgaatggctggcccggcgcaccggcagccgctacctgcgcatcgatccgacccgggttgacgtcgctgcggtcaccgcgctggtctcccacgcctacgcccgccgccaccgcttcctgccgctggcggtggatgccgaacgggtgctggtggccaccagcgagccgctggtgcaggagtggcgccgcgacctgcagcacctgacccgccgcagcatcgagctggcggtggtcaatccgctcgacctgcaccgctacaccatggagttctacggggtgacccgctcggtgcgtggcgcgcgcggcgatgtccgcggcgaagccagcaccaccctgcccagcttcgagcagctggtcgagctgggccgtaccggcgacgtcaatgccgacgaccagcacatcgtgcacatcgtcgactggctgctgcaatatgcctacgaacagcgcgcctcggacatccacctggaaccgcgccgcgagatggggcgcatgcgcttccgcatcgatggcgtgctgcacaaggtcttcgaggtgccaccggcggtgatgaccgccgtggtcagccgcatcaaggtgctcggccgcatggacctggccgaacgccggcgcccgcaggacggccgcatcaagacccgctcgccgggcggccgcgaggtcgagatgcgcctgtcgaccatgcccaccgccttcggcgagaagtgcgtgatgcgcatcttcgacccggatgccgccttcaagagcatcgaccagctgggtttcagtccgcaggaggccgccggctggaatgcactggtcgaacgcccgcacggcatcgtgctggtcaccggcccgaccggctcaggcaagaccaccaccctgtattccacgctgaagcggctggccacgccggacgtgaacgtgtgcaccgtggaggacccgatcgagatgatcgcgcccgagttcaaccagatgcaggtgcaggccaacatcgacctggacttcgccagcggcgtgcgcaccctgctgcggcaggacccggacatcatcatgatcggcgagatccgcgatctggaaaccgcgcagatggcggtgcaggcctcgctgaccggccatctggtgctgtccacgctgcataccaacgacgcgccgtcggcggtcacccgcctgctcgacctgggcgtgccgcactacctgctggccagcaccctcaacggcatcctcgcccagcgcctggtgcgcaccctgtgcccgcactgcaagcagccgcacacccttggtgctgccgactgggcggtgctggctgatagccaagctgcatatccagatgccgccacgccctgtcggccggttggttgcctggagtgccggcgcaccggattcctcggccgcatcggcctgtatgagttgctgccattgggctcgcggctgcgtgggcagatccgcgccgacatggatctggccggtttcacccgtgccgcgcgggctgaagggctgcgaaccctgcgccaggccgggcttgaaaaggtggcgcaggggctgactacaatcgaggaagtcctgtcagtcctgccgcccccggatgaacccagccccgttcctgatccttgaaaccggccgcccggtgccgtcgctgcgccgctacgggcgcttcccgcactggatccgggtggccgccgggctggaagagcacgagacggtggtggtcgatgtcgaacacggggatgccctgcccgacccgcatgccttcgccggcgtgctggtgaccggctcggccgccttcgtcaccgaccacgccgaatggagtgagcgcagtgccgcatggctgcgccaggccgcccacgacgacctgccggtgttcggtatctgctacgggcaccagctgctggcgcacgcgctgggtggcgaggtggcctacaacccggccgggcgcgagtcgggcacgatcgaactggagctgcagccgcaggccgcgcaggacccgctgttccagggcctgccgcagcacttcgccgcccacgccacccacctgcagaccgtgttgcgcgcgcctgacggtgccgaagtactggcacgctcgccgctggatggctgccatgccttccgctgggggcgccaggcctggggcgtgcagttccaccccgagttcgccacccaccacatgcgcggctacgtgcgtgcccgcgccgactgcatcggccgccatggcggctgtgcccgcagcatcgagcgcgcggtcagcgccgcaccgctggcgcgccagctgctgcgccgcttcgttcgccaggcgcggctgtcttcagcccagccggcggcaaaacagggataatcggcggcacgggcaagcgcccggcccctcctgtccttcccggatgtccatgaaagagattcgcaagctgccggcctcggcgggcgcccagtggttgctggatacgttctcgctgtatcggcgtgcgccgctgcagctggcccggatcggtctgacctggctgctggtgagctgggtggtcaccctgttgtcgacgctgattcccggcgccgccggcatggccgtgcagctgatgaccctggccatctcgccgatcatgttcggcggcatgctgtacgccgtgggtgagatcgacgaaggtcgcccgggcctggcctcgcacctgctgcagccgatccgcgaccaccgcgtcagccacctgctggtgccgctggcgatccaggtgctggcggtgctgctgctgggcgcgctgctgttcctgatgatcggccgcgaaggcttcaccgccttcagcgaggtcatgaccaagatggaagagatcagccgcagtggccagcagatcaagccggacgatgctgcggcgctggtggccaacctgccggccaagcgcatcgcactgtggatgctgctggtgttcctgagcgcggtcgcactgtcgctggcaatgttcacccagccggcgctggtggtgttcgacaagcagagcggcatgcacgcgctgcgcctgagcctgcagggctgcatcgagaacatcggcgcaatgatcgtgttcgccgtgctcggcctgatcgccgcgttctgcatctacatcctgttcgtgatcgtgatccagatcgcgatgctgatcggcggcccgctggccgccgccttcatcgcccagctggtgctgaccacggtgctgatgccgctgtatgtcggcgcggtctacgccgcgtggaagcagatgttcgtgcaccgtggcagccgcgccgcaccgccgatcccgaccacgccgacctcgagcgacatcttccacgcctgatgaaaaaaggggacggaggggattaagtcgttagctgcacacactgggcataaacgacttaatcccctccgtccccttttttctttcaggcggcgggcttcttgactgccgacgacggcaccagccagcgtgcggcgtggatgcccagctcatagagcaggcacatcgggatcgccagcatcagctgcgaaaccacgtccggcggggtcagcaccgccgccagcacgaagatgccgacgatcgcgtagccgcggccttccttgaactgctgcggcgtcacccagcccagcagcaccaggatcaccatcgccaccggcagttcgaagctgccgccgaaggcgaagaagatcgccagcacgaaatccaggtaggcatttgcatccggggtgatcgcaatcacgtccgggctgaaggtggtgaggaagtggaacaccgccggcagcaccaggaagtaggcaaaggcacagccggtgtagaacagcagcaccgaggacaccagcagcggcaccgccaggcgcttctcgcgcgcatacaggccgggcgcgacgaaggcccacagctggtacagcagccacggcaccgccacgaacagggcaacgaagaaggtcagcttcaacggcgcgaagaaggcgccggccggattggtggcaatcatcgtctgcccgttcggcagctgcgagaccagcggctcggccaacgcgttgtacagcttctgggtgaacggcagcagcgccagcagcaccacgcccaggcccagcaatgcgcgcaccaggcgaccgcgcagttccaccagatgttcgaccagcgagctctcgccgaaatcctgttcactcatggctggcgctccgtgcgcggcggcgcaccggcttcagggggtgtcaccggcgtcggctcgggagcgacgccctcctgtaccggtgcatcggcacgggtcaggccgctcatatgcggcggcagatccgcaggcgccggtgcgcgtacctcctgcgccagcgtatcgccctgctgctgcgcctcctgcgcttcgcgacggatcgcttcgccgcgggcacgcagctggttctcggtgtcctgcatgccctggcgcacgtcctgcatctgccgcttgatctcctcggcctgcagttcgcgctccagttcctgtttcaccgaatcccattgattgcgggcgcgacgcacccacaggcccgcaaagcgggccgccttgggcaggcgctcgggaccgagcaccaccagggcgaccacggcgatcaccagcagttcgctgaagccgatatcaaacaccgcgaccgctccggatcagcgaggggtgcggtcgtgctcgtcctgcgcggtgcgcgaggcgtcctggctgcgcgactcgtcgcccagctgcgcgttcggcttgtcgtcgtcgcgcatgcccttcttgaattccttgaccgccgaaccgaggtccttggcgccactggtcaggcgcttggtgccgaacaccagcaggacgatggccagcacgaccaaccaatgccagatgctgaaactgcccataaagacgctcgttacgttagtgatcaggctgtcgagcatagcgcaccgggtgttagccggcgcgcgtgacgaaagtcagtttccgcccagcgtttccgtgcggatttcgccgtcgttgaccggctggaagccctgctgctgcggcggcgggttctgcggaacgttctgcagcggcgcggtggtggcttcggccggggccgccggtgctgcctgaacgggcacagacacgggggcggcagccggcgccggacgcggtgcattgccaccgctgccgttgcggttgttgcgggcggcgtaggtggcctcttccaggcgatcgcggaaggcgaccacgtccatcgacggcgaaccgacggcgcgaccttcgaagatcatgcgcggcgtggtgttgctgccgtaggcgtccagattggcggcatcgtcgatctgcagcaccgcgccatccagcgcgacaccggcgaacaggccgcgcgcgcgcgaccacgaccagatctcggccttcagctggccgtcggtggcggcggcggcattgcggccgaccggaccggcggcaacgccggcatcggcgccaagcgtgaacttgccattgaccaggttgtccaggctgcggtcgttgcggaacaccagcactacgtcggaagactgcacgccggcctggaagccgatgctgccaccggtcagcttgacgaataccgggctggaccaggcgccattgggcatgcgcaccgacatcagcccgtggccgcgacgaccgccaatgaccaagccggccttgatcgtgtcgggaatgacgatgaccgcgcggccttcgtcgagcaacttgtccggaattccctgttcagggatttcctggatctccgccagcacgcgcacggcattgcgggcgcgctggtcttcctgcggtccggccatggcctggctggacagcaggctggcggcgatcagcagggcttggatcgggcgacgcatggcaggctccagaagtcagtccataggaagatatagcaagtgactgaaattagtagtgttgtcatgaatcgccaatgagcgctccccgctcacatagatgcgcgctatgccagcaatccgaaccctgcatcccggtgcgacaccggatcggcgacaatgcaccccatgctcgacgcacccgataccgccgtgctggcggtcaacctaggcacgcccgatacgccgacggcccccgccgtacgccgttacctggccgaattcctgtccgaccgccgcgtggtcgcgatcccgccactgctgtggcagccgctgctgcgcggactgatcctgccgctgcgcagcagccgttcggcggccaagtacgcccaggtctggctgccggatggctcaccgctgatggtccatacccggcagctggcgcaggcgatgcaggccctgctgccaaccctgaaagtgcgccacgcaatgcgctatggcgaaccggccctggcccacgagctcgaccgcctcgccggcgaaggcgcacgccgcatcgtggtgctgccgctgtacccgcagtactccaccaccaccaccgcctcggtcgaggaccgggtcgatgcctggcagcggcgcaacccgggcgtgaccgtcagtctggtacgcgactactcggtcgacccgggctgggtcgaggccgttgccggctcgatccgccgctactgggaacagcacggccgcagccagaaactgatgttctccttccacggcattccgcagcgcctggccgacgcgggtgatccgtatccgcagcgctgcgaggccagcgcgcaggccatcgccaacgcgctgggcctgggcaaggacgactggcagatgggttaccagtcgcgcttcggccgcgagcgctggctgcagccttacgctgagccgagcctgtgggcgttggccgaatccggtgtgaagcagatcgacgtggtctgccccggcttcgccaccgattgcctggaaacgctggaagaagtcgcgatgggcttcaccgaaacgctggccgaacgtggcgcgacgatgcgctacatcccctgcctcaatgccgaaccggaacacgcgcgcgccctggcgcgactggccgtggcctcgctggcatgagtctgcaaccctttgaactcgaggtgggcggcacccgcgtcgccggcctgcgcaacagcggcgacggcccgcgcgtgctggccctgcatggctggctcgacaatgccgccagcttcgtgccgctggcgccgcacctggcgtcgctgcagctggtggcgatcgacctgcccggccatggccacagcgcgcacctgccggccggtgccagctacaccacggcggccgcgatctgccacgtgcttgatgtggccgacgccctgggctgggaccgcttcagcctgctcggccattcgatgggcgccggcatcgccagcctcaccgcctcggtcagcgaccgcgtcgagcgcctggtggcgatcgaagctctcggcggcctgcgcggccccgaagaagagaccgcccatcgcctgcgcgagcatgtgaacgccacccgtgcgttggcgcgcaagcagctgcgcgtgttccccgacctggccgcgccgatccgcgcacggatgatgaccaaccagctcagcgaaccgtgcgcacgactgctggtcgagcgcggcgtggaaccggtcgaaggcgggtatcgctggtgcagcgatccgcgcctgatgctgcccaccgcgatccgcctcagcgagggccagatcgacaacctgctgcaggccatcgcctgcccgacacaggtgatctatgccacgccggcgcagtcgtattatcccgagccgatgcgcagcgatcgcctgcagcacctgcgggatggccggctggcagtgtttcccggcaaccatcacctgcacatggaagatccggaacagatcgcaggcgtgatcctgcacttcttcagcaacgacaacgccggctgagcgcaggcgtccgcgcgcttcactccgcgcgtttgcggccgatacatcagttgcgggtccctgcgcccgctgcacgcgggcccggtcggtcctgcggcatgtgtctggttctgcaaggaagtccgcatgcccgctctgctgcaccgtcacccacaggatgtggccgcggtgtcccgtctccgcgtcgctgctcgcgccgcatccctcgaattcccggcacccgccctcgtcacgccctgctgcgtgcgttgcggcgtgctcgttgtcgtctgctgacccaggagcctccgatgtccattgcatccgcccgtccccccgataccgcccgcctgtcgcacctgcaacagctcgcccgcggtgctgaccgccgcctgctgaccggcagcgcggcactggccgtgaccgggctggtgctggccctgcgcggtccgcacggtgtggccgccgcgttggccgcgggcgctgtgctgcccgccttgtggctggccggtccgctggcaggccgcggcatcgcccgcaacgccctggcaatcctggtggcgctgcagctggccctgttgtccgcgatcaccggcctgtcgccggcgttgccgatcgccctgctgctgggcgtgctgctgggccatcgcgatcgtctgccggtgtggctggccggtagcatcggcacgcttgcactgctggccccgctgccggccggtgctgcggtggggccggcgctgctgcaggccgcgatgctggccggcctgaccctgttccttggccaggtcgcactgcggctccgccagcagaccgaagcacttggccacggtccccgccggctggccgcgctggcgcgcgacatcgccaccggcgccgatcttggtgcacatgctgacaccaccgcctacgcaccgggttcgctggcccatgcgctggccgacaccgcacgccatgtgcaggcccagcgtggacgcgaagcggaggcacacgccgagaacgcgcagatccgccaggccctcgatgcctcgcgcaccgcgatgatgattgccgacaacgatcacgtgatccgctacgtgaaccgctcggtggtggccctgctgcgcaaccagcaggcaacgttgcgccaggccttccccgatttcgatgccgagcgcctggtcggtagcagcattcatcgcttccacgccaacccggaccggatccgcgccatcctcaatggcctgcaggtcagccacaacggcaaggtacagatcggcccggtgcacttcgcacaggtggttactccggtcttcgacgcacagggcgtgcgcctgggctttgccgtggagtggcatgaccgtacccatgagctcgccttggagaacgccgtcgccggcatcgtcgcggccgccgccgccggcgacctcgaccagcgcctgcaggcaaccgaaggtgccagcttcctcgatggcctcaccggtggcatcaaccagctgctggatacgttgggcagtacggttgacgaggtgcggcagatgctctcggcgctggccagcggcgatctcgatcgacgcatgcatggcgagtatcacggcgcctttgccgcgatccagcgcgatgccaacgccaccgccggccagctggcgcgcatggtgggccgcatccagcagtgcgcgtcctcgatcagcaccgctgccagcgaaatcgctgcgggcaatggcgcgctgtccgagcgcagcgagcgccaggcagcgcacctgcaggaaaccgccgcttcgatggaagagctgactgccaccgtgcgccagaacgctgcccatgcgcgcgaggcgagccagctggcgatcaccacccagagcgccgccagcgacggcaacgtcgccatgcagcgggtcgtcgacaccatgcaggcgatcgagggagcctcgaagcggatcggcgacatcactggcgtgatcgatggcatcgccttccagaccaatatcctcgcgctcaacgcggcagtggaggccgcccgtgccggcgagcagggccgtggcttcgcggtggtggccagcgaggtgcgcgtgctggcgcagcgctccgccgccgcggctcaagaaatcaagaagctgatcgatgaggcaggtcgccaggtgggcgaaggcgcccagctggtggccgatgcgggccagcggatgcagggcattgtcgggggcgttgagaatgtcagccacctgatgcacgagatctcggcggcctcgcaggagcagtcggtcggcatcgagcagatcaaccagaccgtggtgcagatggaccaggcgacgcagcagaatgccgcgcttgtggaggaagccaccgcggccgcacgcgagctgcaattgcaggcgggtacgcttaccgaggcggtatcggtgttccgccagcaggaaccgcacgaggtctcgcgggccgcctgatccgggcctgcagttccatcccggtcaagacggcgcccgcagggcgccgttttttttgcctgcttttgcgtgatgggtcaggaaagtccgcttccggacctgccgtgaggagcgaccaaccctggctggcgccgcatccacacacggcgtggatctactgtgcgcccgcatgccctcggtagtcgccaaccctagttggcgctggggctgcccgcggagaatatccacgcatggcgtgcatctaccggccggtgtgcagctatggcggtgccggccggcggccggcactacccgcatgttctgcgcacaaagaaaaaccccgctgcgcaagcagcggggttttgggtataaaccctggcgatgacctactctcgcatggcttgagccacactaccatcggcgcagctgcgtttcacttccgagttcgggatgggatcgggtggttccacagcgctaatttcaccagggaggcttttggagcgtcgcactcgtcccgggggacaaggcgccagcctcgcatagttcttgtgacgtagcgtgcacttggatgctcttacgacgttgtcgtaaagccaaggcaacttgaggttatatggtcaagccgcacggatcattagtatcagttagctcaatacattgctgtacttacacacctgacctatcaaccacgtagtctacatggttccttcagggggcttgtgccccgggagatctcatcttgaggcgcgcttcccgcttagatgctttcagcggttatcgcttccgaacatagctacccggcaatgccactggcgtgacaaccggaacaccagaggttcgtccactccggtcctctcgtactaggagcagcccctctcaaatctccaacgcccatggcagatagggaccgaactgtctcacgacgttctgaacccagctcgcgtaccactttaaatggcgaacagccatacccttgggaccgactacagccccaggatgtgatgagccgacatcgaggtgccaaacaccgccgtcgatatgaactcttgggcggtatcagcctgttatccccggagtaccttttatccgttgagcgatggcccttccatacagaaccaccggatcactaagtcctagtttcctacctgcttgatccgtcgatcttgcagtcaagcacgcttatgcctttgcacacagtgcgcgatgtccgaccgcgctgagcgtaccttcgagctcctccgttactctttaggaggagaccgccccagtcaaactacccaccatacacggtccccgacccagataatgggcccaggttagaacgtcaagcacgacagggtggtatttcaaggatggctccgccacagctagcgccatggtttcatagcctcccacctatcctacacagacgaactcaacgttcagtgtaaagctatagtaaaggttcacggggtctttccgtcttgccacgggaacgctgcatcttcacagcgatttcaatttcactgagtctcgggtggagacagcgccgctgtcgttacgccattcgtgcaggtcggaacttacccgacaaggaatttcgctaccttaggaccgttatagttacggccgccgtttactggggcttcgatcaagagcttcgccttgcggctgaccccatcaattaaccttccagcaccgggcaggcgtcacaccctatacgtccactttcgtgtttgcagagtgctgtgtttttgataaacagtcgcagcggcctggttactgcgaccctcttcagctatagctcgcacgagccaccaaaaagggtgcaccttctcccgaagttacggtgccatgttgcctagttccttcacccgagttctctcaagcgcctgagaattctcatcctacccacctgtgtcggtttacggtacggtctgcgtaagctgaagcttaggagcttttcctggaagcgtggtatcagtgacttcgccttaaaggctcgtctcggtgctcggtcttagaggatcccggatttgccaaagatccaaacctaccgcctttccccaggacaaccaacgcctggtacacctaaccttctccgtccctccatcgcacttacgcgaggtgcaggaatattaacctgcttcccatcgactacgactttcgtcctcgccttaggggccgactcaccctgcgccgattaacgttgcgcaaggaaaccttgggctttcggcgtgcgggtttttcacccgcattatcgttactcatgtcagcattcgcacttccgatacctccagcagacttctcaatccaccttcaacggcttacggaacgctcctctaccgcgcatacaaagtatgcaccccaagcttcggttctgtgcttagccccgttaaatcttccccgcagaccgactcgaccagtgagctattacgctttctttaaagggtggctgcttctaagccaacctcctggctgtctgtgcctttccacatggttttccacttagcacaaaatttgggaccttagctgtgggtctgggttgtttcccttttcacgacggacgttagcacccgccgtgtgtctcccatacagtccgtctcggtattcggagtttgcaatggtttggtaagtcgcgatgaccccctagccataacagtgctctacccccgagaggatacatatgaggcgctacctaaatagctttcgaggagaaccagctatctccgggttcgattagcttttcactcctaatcacacctcatcccctacctttgcaacgggagtgggttcgggcctccagtgcgtgttaccgcaccttcaccctgggcatgactagatcacccggtttcgggtctactgcccgcgactatgcgcccttatcagactcggtttcccttcgcctcccctatacggttaagcttgccacgaacagtaagtcgctgacccattatacaaaaggtacgcagtcactccttgcggagctcctactgcttgtacgcacacggtttcaggttctatttcactcccctctccggggttcttttcgcctttccctcacggtactggttcactatcggtcggtcagtagtatttagccttggaggatggtccccccatgttcagacagggtttcacgtgccccgccctactcgtcttcactgaaatggccctttcagatacagggctatcaccttctatggccactctttccagagtgttttcctagaaccaaatcagcttaagggctagtccgcgttcgctcgtcgctacttacggaatctcggttgatttcttttcctctggttacttagatatttcagttcaccaggttcgcttccagcagctatgtattcactgcaggatacccgcaagcgggtgggtttccccattcggacattaccggatcaaagcttgttgccagctccccgatacttttcgcaggctgccacgtccttcatcgcctctgaccgccaaggcatccaccgtgtgcgcttattcgcttgaccatataaccgcaagttgccttgggttacatatgacccgggggtacaaagcccggatacgaatataacgactcaatcaataaagagacttgcgtctctcgccttagccttacgacacgtctgatagaacatctcaaacgctcgctacgtcacaagttttaaaagaacacgtaccagccacagtgctgatgcgtataaagatcgattgtatgcgtcattcagagaatggtgggtctgggtagactcgaactaccgacctcacccttatcaggggtgcgctctaaccacctgagctacagacccggaaaactttccggaacaaactcaaacatggtggagcctgtcgggatcgaaccgacgaccccctgcttgcaaagcaggtgctctcccagctgagctaaggccccaaaagggactctcatatcggcctggccgacatgattctctgaatgcaggtactttgtgaagacgcccgacaggacgatgctgtctttgctcaaaaggaggtgatccagccgcaccttccgatacggctaccttgttacgacttcaccccagtcatcggccacaccgtggcaagcgccctcccgaaggttaagctacctgcttctggtgcaacaaactcccatggtgtgacgggcggtgtgtacaaggcccgggaacgtattcaccgcagcaatgctgatctgcgattactagcgattccgacttcatggagtcgagttgcagactccaatccggactgagatagggtttctgggattggcttaccgtcgccggcttgcagccctctgtccctaccattgtagtacgtgtgtagccctggccgtaagggccatgatgacttgacgtcatccccaccttcctccggtttgtcaccggcggtctccttagagttcccaccattacgtgctggcaactaaggacaagggttgcgctcgttgcgggacttaacccaacatctcacgacacgagctgacgacagccatgcagcacctgtgttcgagttcccgaaggcacccatccatctctggaaagttctcgacatgtcaaggccaggtaaggttcttcgcgttgcatcgaattaaaccacatactccaccgcttgtgcgggcccccgtcaattcctttgagtttcagtcttgcgaccgtactccccaggcggcgaacttaacgcgttagcttcgatactgcgtgccaaattgcacccaacatccagttcgcatcgtttagggcgtggactaccagggtatctaatcctgtttgctccccacgctttcgtgcctcagtgtcagtgttggtccaggtagctgccttcgccatggatgttcctcctgatctctacgcatttcactgctacaccaggaattccgctaccctctaccacactctagtcgcccagtatccactgcagttcccaggttgagcccagggctttcacaacggacttaaacgaccacctacgcacgctttacgcccagtaattccgagtaacgcttgcacccttcgtattaccgcggctgctggcacgaagttagccggtgcttattctttgggtaccgtcatcccaaccaggtattagccggctggatttctttcccaacaaaagggctttacaacccgaaggccttcttcacccacgcggtatggctggatcaggcttgcgcccattgtccaatattccccactgctgcctcccgtaggagtctggaccgtgtctcagttccagtgtggctgatcatcctctcagaccagctacggatcgtcgccttggtgggcctttaccccgccaactagctaatccgacatcggctcattcaatcgcgcaaggtccgaagatcccctgctttcacccgtaggtcgtatgcggtattagcgtaagtttccctacgttatcccccacgacagagtagattccgatgtattcctcacccgtccgccactcgccacccaaggagcaagctcctctgtgctgccgttcgacttgcatgtgttaggcctaccgccagcgttcactctgagccaggatcaaactcttcacttaaaactacatgatccgaagatcaaaatttaaagctgcagatgattgattctggcaacgtatcgcttgctttaaaacaattaatagttgcttgatcaaacgtctgcaagatggacaatcatccttcctgcaggcgccttcacaagatacctgcgcatactttcaaagatccggggaagtggcctcagcgccgttcccgtgtgctgcgaagtttccttcgtagcgagccgcccattatagccggcttttccgcttcgtcaacaccttttttcaaggccgtctcaccggagtggacgttgttgccgatgctgcttcgtcgttgggcccgagggcctttcgtcgttgcgagccgcctattatggcaggcctttcagctttgtcaacaacttgtttgaggaacttgaagctcttcgtgaagttgttgccgcaagtccaggtcgaaaccaagtgcctgcaaaaaaggaaaaccccgctgcgcatgcagcggggttctcgggtgtaaaccctggcgatgacctactctcgcatggcttgagccacactaccatcggcgcagctgcgtttcacttccgagttcgggatgggatcgggtggttccacagcgctaatttcaccagggaggcttttggagcttcgcactcgtccctgggggacaaggcgccagcctcgcatagttcttgtgacgtagcgtgcacttggatgctcttacgacgttgtcgtaaagccaaggcaacttgaggttatatggtcaagccgcacggatcattagtatcagttagctcaatacattgctgtacttacacacctgacctatcaaccacgtagtctacatggttccttcagggggcttgtgccccgggagatctcatcttgaggcgcgcttcccgcttagatgctttcagcggttatcgcttccgaacatagctacccggcaatgccactggcgtgacaaccggaacaccagaggttcgtccactccggtcctctcgtactaggagcagcccctctcaaatctccaacgcccatggcagatagggaccgaactgtctcacgacgttctgaacccagctcgcgtaccactttaaatggcgaacagccatacccttgggaccgactacagccccaggatgtgatgagccgacatcgaggtgccaaacaccgccgtcgatatgaactcttgggcggtatcagcctgttatccccggagtaccttttatccgttgagcgatggcccttccatacagaaccaccggatcactaagtcctagtttcctacctgcttgatccgtcgatcttgcagtcaagcacgcttatgcctttgcacacagtgcgcgatgtccgaccgcgctgagcgtaccttcgagctcctccgttactctttaggaggagaccgccccagtcaaactacccaccatacacggtccccgacccagataatgggcccaggttagaacgtcaagcacgacagggtggtatttcaaggatggctccgccacagctagcgccatggtttcatagcctcccacctatcctacacagacgaactcaacgttcagtgtaaagctatagtaaaggttcacggggtctttccgtcttgccacgggaacgctgcatcttcacagcgatttcaatttcactgagtctcgggtggagacagcgccgctgtcgttacgccattcgtgcaggtcggaacttacccgacaaggaatttcgctaccttaggaccgttatagttacggccgccgtttactggggcttcgatcaagagcttcgccttgcggctgaccccatcaattaaccttccagcaccgggcaggcgtcacaccctatacgtccactttcgtgtttgcagagtgctgtgtttttgataaacagtcgcagcggcctggttactgcgaccctcttcagctatagctcgcacgagccaccaaaaagggtgcaccttctcccgaagttacggtgccatgttgcctagttccttcacccgagttctctcaagcgcctgagaattctcatcctacccacctgtgtcggtttacggtacggtctgcgtaagctgaagcttaggagcttttcctggaagcgtggtatcagtgacttcgccttaaaggctcgtctcggtgctcggtcttagaggatcccggatttgccaaagatccaaacctaccgcctttccccaggacaaccaacgcctggtacacctaaccttctccgtccctccatcgcacttacgcgaggtgcaggaatattaacctgcttcccatcgactacgactttcgtcctcgccttaggggccgactcaccctgcgccgattaacgttgcgcaaggaaaccttgggctttcggcgtgcgggtttttcacccgcattatcgttactcatgtcagcattcgcacttccgatacctccagcagacttctcaatccaccttcaacggcttacggaacgctcctctaccgcgcatacaaagtatgcaccccaagcttcggttctgtgcttagccccgttaaatcttccccgcagaccgactcgaccagtgagctattacgctttctttaaagggtggctgcttctaagccaacctcctggctgtctgtgcctttccacatggttttccacttagcacaaaatttgggaccttagctgtgggtctgggttgtttcccttttcacgacggacgttagcacccgccgtgtgtctcccatacagtccgtctcggtattcggagtttgcaatggtttggtaagtcgcgatgaccccctagccataacagtgctctacccccgagaggatacatatgaggcgctacctaaatagctttcgaggagaaccagctatctccgggttcgattagcttttcactcctaatcacacctcatcccctacctttgcaacgggagtgggttcgggcctccagtgcgtgttaccgcaccttcaccctgggcatgactagatcacccggtttcgggtctactgcccgcgactatgcgcccttatcagactcggtttcccttcgcctcccctatacggttaagcttgccacgaacagtaagtcgctgacccattatacaaaaggtacgcagtcactccttgcggagctcctactgcttgtacgcacacggtttcaggttctatttcactcccctctccggggttcttttcgcctttccctcacggtactggttcactatcggtcggtcagtagtatttagccttggaggatggtccccccatgttcagacagggtttcacgtgccccgccctactcgtcttcactgaaatggccctttcagatacagggctatcaccttctatggccgctctttccagagcgttttcctagaaccaaatcagcttaagggctagtccgcgttcgctcgtcgctacttacggaatctcggttgatttcttttcctctggttacttagatatttcagttcaccaggttcgcttccagcagctatgtattcactgcaggatacccgcaagcgggtgggtttccccattcggacattaccggatcaaagcttgttgccagctccccgatacttttcgcaggctgccacgtccttcatcgcctctgaccgccaaggcatccaccgtgtgcgcttattcgcttgaccatataaccgcaagttgccttgggttatacatgtgacccgggggtacaaagcccggatacgaatataacgactcaatcaataaagagacttgcgtctctcgccttagcctcacgacacgtctgatagaacatctcaaacgctcgctacgtcacaagttttaaaagaacacgtaccagccacagtgctgatgcgtataaagatcgaatgtatgcgtcattcagagaatggtgggtctgggtagactcgaactaccgacctcacccttatcaggggtgcgctctaaccacctgagctacagacccggaaaactcttccggtacatggcccagtatggtggagcctgtcgggatcgaaccgacgaccccctgcttgcaaagcaggtgctctcccagctgagctaaggccccaaaagggactctcacatcggcctggccgacatgattctctgaatgcaggtactttgtgaagacgcccgacaggacgatgctgtctttgctcaaaaggaggtgatccagccgcaccttccgatacggctaccttgttacgacttcaccccagtcatcggccacaccgtggcaagcgccctcccgaaggttaagctacctgcttctggtgcaacaaactcccatggtgtgacgggcggtgtgtacaaggcccgggaacgtattcaccgcagcaatgctgatctgcgattactagcgattccgacttcatggagtcgagttgcagactccaatccggactgagatagggtttctgggattggcttaccgtcgccggcttgcagccctctgtccctaccattgtagtacgtgtgtagccctggccgtaagggccatgatgacttgacgtcatccccaccttcctccggtttgtcaccggcggtctccttagagttcccaccattacgtgctggcaactaaggacaagggttgcgctcgttgcgggacttaacccaacatctcacgacacgagctgacgacagccatgcagcacctgtgttcgagttcccgaaggcacccatccatctctggaaagttctcgacatgtcaaggccaggtaaggttcttcgcgttgcatcgaattaaaccacatactccaccgcttgtgcgggcccccgtcaattcctttgagtttcagtcttgcgaccgtactccccaggcggcgaacttaacgcgttagcttcgatactgcgtgccaaattgcacccaacatccagttcgcatcgtttagggcgtggactaccagggtatctaatcctgtttgctccccacgctttcgtgcctcagtgtcagtgttggtccaggtagctgccttcgccatggatgttcctcctgatctctacgcatttcactgctacaccaggaattccgctaccctctaccacactctagtcgcccagtatccactgcagttcccaggttgagcccagggctttcacaacggacttaaacgaccacctacgcacgctttacgcccagtaattccgagtaacgcttgcacccttcgtattaccgcggctgctggcacgaagttagccggtgcttattctttgggtaccgtcatcccaaccaggtattagccggctggatttctttcccaacaaaagggctttacaacccgaaggccttcttcacccacgcggtatggctggatcaggcttgcgcccattgtccaatattccccactgctgcctcccgtaggagtctggaccgtgtctcagttccagtgtggctgatcatcctctcagaccagctacggatcgtcgccttggtgggcctttaccccgccaactagctaatccgacatcggctcattcaatcgcgcaaggtccgaagatcccctgctttcacccgtaggtcgtatgcggtattagcgtaagtttccctacgttatcccccacgacagagtagattccgatgtattcctcacccgtccgccactcgccacccaaggagcaagctcctctgtgctgccgttcgacttgcatgtgttaggcctaccgccagcgttcactctgagccaggatcaaactcttcacttaaaactacatgatccgaagatcaaaatttaaagctgcagatgattgattctggcaacgtatcgcttgctttaaaacaattaatagttgcttgatcaaacgtctgcaagatggacaatcatccttcctgcaggcgccttcacaagatacctgcgcatactttcaaagatccggggaagtggcctcagcgccgttcccgtgtgctgcgaagtttccttcgcagcgagccgcccattatagccggcttttccgcttcgtcaacaccttttttcaaggccgtctcaccggagtggacgttgttgccgatgccgcttcggcgttgggcccgagggcctttcgtcgttgcgagccgcctattatgccggacttttcaagtccgtcaacacctttgttcgatcaactcgttcgccggtggtggcgtcgctgttcgcgtgtcgtttccggggaagcgatgcgctgcagcaagggagcgaattctagagatcctgcggatttcgtcaaggcttttttgcagcgtgatgacagaagcaccacgccatcacgcatgacgtacgctcgaagatcactgcggcgttgcccgcgcgttgcgcggtcaacgccgaaacccttatcaatgcagggatgcacagtggagacagggcaatgagcatgcaagtgcggcgcgcgtggtggcgcgatctttcgatgccggcaatcgtcgctggcttcattacggtactggtgggcttcgccagctcggccgtgatcgtgttccaggcggcacaggccgtcggggccgaccaggcgcagatcgcctcctggatgtgggcgctggggctgggcatgggcgtgacctgcattggcctgtcgctgcgctatcgggtgccggtggtgacagcgtggtcgaccccgggtgcagcgatgctggtggtgggtgccggcggtgcttcgctctccgaggccacgggcgcattcctgctggccgccgtgctgggcctgcttgcgggtttctcgggggtcttcgcgcgactgatgcaacgggtaccgatggcgctggccgccggcatgctggccggtgtgctgctgcgcttcgggctggatgtgttcgtcgccatgaacacccagctggtgctcgcgctggcaatgttcgccacctggctggccgggcgccggctgttcccgcgctatgcggtgatcgccacgttgctggtcggcatcgccgtcgccgcgagccgtggcctgctgcacgcccagcaggtgcatctgcaactggcgatcccgcagtgggtgacgccctcgctgtcgtggaccgccgtggccggcattgccctgcccctgttcgtggtcaccatggcctcgcagaacattcccggtgtggcggtgatgcgcgcgtccggctacgacgccccggtgtcgccgttgatcggctggatcggtgcagtcaatacgctgctggcgccgttcggtgcgtatgcactgaacctggcggcgatcaccgccgccatctgcatgggccgcgatgcgcacgaggatccggcgcgccgctacaccgcagcgatggcggccggcgccttctacattgtcatcgggctgttcggcgccacggtggccgcactgttcgcagccttccccagggagctggtggcctgcgtggccggtatcgcgctgttcggcaccatcggcaacagcctggccagcgccctggcggtggagcgcgaccgcgaggctgcactcgtcaccttcctggtcaccgcctcgggggtctccctggccgggatcggttcggcgttctggggactgctggccggtgcactgtgcctgctggtgttgcgggcacggacagcggcctgagcaaccctatcaggccggcatgatcaggccgccatgcgggcgacggtattgatcaccgcgttggccgccatgccgatcaccaccgcccacacgctggtgccgccacgacgctgcagttcggcacggatgcggttgtgctgcccggcgtgggcagccttcactttgcccagcagtcgcgtgcagtagcgcaggtacagggtgttggcggtcaccgcgatggcgaaccgaggcaccgccagcaacgccaccgtgagcagcgggttggcgcgtgccgccagcagcgcgatgccgatcaggaccagctcgaagaggatggctgccaggtacatcttccggtgcagcagccagtacgtcggcaccaggaaggcgggccagtgccacggtcgcggcggcttcggcaccgggctgcccaggtgccagcgctggcgatagagcgccgcgttggggccgacgaggaggttcaggtagtccgcgtcggacggagcgggcgcgtcgtccacctctgtagcgggcgcaagatagggattgtcatccgccggggaaaccggcggagtatccagatgattcatgtcggcgattccttgcccaggacgatccagcggtagcggcagccaccgctggatctgaagccttcccggcctcagcctgccagcgcctgccccaccagcatcaccgcaacgacggcgatggccaccaccgccgccgccagtgcattggtgtcaccccgtctggccagctcgctgcgcaggcgcgcctcgtcatctcccaccaacgcgcgcgcgcgggcgatctcacgctggcaatgcgccaggtaccagcggttggcatacaccgcggcggtgatgttgatgacgagggtgatgaccgtcgacacgccttccggaacgcccagcaacgcctcggcgatgctgaagaacaccagcacgccggcccagatcgccgccagccggtacatcctgcggtacaccatccagatcacgccgatcaggaacgccggccagtgccaggtgccgttgccgtcggcaatgccctggtcgagccgccagcgctgtcgatagatcgggaagttgccgccgaccacggcggcgtacaaggcgatgtcgccttccagctgcggcgcggtcgcggccaccggcgaagctgccggcgcacgataggggtcggacggatcagcggtcgatgcgccgctggcgctgaaggcctgcgccggttcaatcgacggcggggtcggatccatcggcgccaccgaaggatccagctcggccagcggccgccacgatgccattccttcccgccacatcagcgtacgggcggttaccgtgccgtcctgctgcagacggcgcagcccggccaggtccaccggcccttcgctctgcttgctgttggcgtaccaccactgtgcgtcctgcatgccatccattcctgtcgatcccatggttactccgaacaccccgccacggcctgcagcggttcactggccagtacctgcaccagctggtggcgcgcgccgggtgcaagggcaatctgctccggcccggcattggctacttccaggcacacgtaatcgtgccaaccgtcgccgacatcggccatcttcgccgccgcctccgcgcccggattccacgccaccagggtctggctgccttcgctgcggatctcgatccgccgctgcaggacgggatcgcgaagcacgtagtggccaccggcaccggtatagatgcggtcgctgcgccccggatcgcgcgggtcacgcagcgaccagggcccctgctgccggcgcagctgcgtgtaatcctcgtacttgtccagatagtgcaggccatcgaggccatcaacctcgacacgacgggcatcgcctacccggaagtagctgtgcagggcctgtgtgaaagccaccggggacgggccggtgttctcggtggtcaactgctggcgcagctggcgaccgatgcgcagctgcatctgcaggcgcaggccacactcggcaatcgacaggggcgccagctgcagctccagttcaccgtcatcgtcctggcgggcctgcagcagctcccagcgcgcggtgcgtaccaggccgtgtgccggcacgtcatcactctggccctggcgaccgaaccacggccagcacactggaacgccaccccggatcggcgtgggcagcccggcccgtttcggcgacagccacagcaggtccggctgcccctccgggatgaacgacagcagctgtccgccgaacacgctgatgaccgcggtggcgctgggcgtgcgtatctgccaggcctcgagcccgtggtacaggccggtgctgatgtccgggttcgactgcatgctatgacgctccttgaagaccgcggcgatgatgtcgcggccagcctgtgatcggcaaggtctagcgggtggcaggcgtccctgcggctgcctcctgctgcaacgcgcgcaggatgcgctggccggcgcgcccatccgcattggcccagcccaggcgctgctgctcggcctggatcgcgcgacgcgtggcggtgccgatcatgccgtccgcgctgccgatgtcgtggccgcgggccagcagcagggtctgcagctggcggcgttcatcgcggccgatgccgggatcatcggtcggccaggcggtggccaggccggtgccgccgcgcagctggtcggccagcgtggcgatggccagtgcatagctttcggcggcgttgtagctgtagatcgcatcgtagttgcggaacaccagcagcgccgggcccttgatgccggccggcagcagcagggcggcgcgcgcgtcggccggcagattgggcggccccagcgcgctgccatccagcgcggtcacgccctgcacgcgccaatcggcgagggctcgacgttgggtgcggcccgcctggctggcattgaagccggggggaacacgaacctccatgccccacggttcgccactgcgccaacccgcacgcttgaggtagttggcggtggacgccagcgcgtcgggaatgctgccgaccagatcgcggcggccatcgccatcaccatcgaccgcgatacgtgcgtaggtgctgggcatgaactgcgtatgcccgaaggcgccggcccaggaaccggtgagcccctgggcctgcaggtcgccgcggtcgatcagcttgagcagcgccagcagttcgccacggaagaaggcctggcggcggccggcgcaggacagcgtggccagcgactgcagcagcgggcgcttgccgaagacgcggccatagtcgctctccaccccccagaccgcgacgatggtggccgggtcgacgccatactgcgcggagacgcgatcgagcagatcgcgatgttgctgcagcagggtgcggccatcatcgacgcgctggcggtcgaccagcgcggccaggtaatcccagatcggcgtggtgaattccggctgtgcgtccagcagtccgagcacgctcgggtccggcgtgagcccggtggtgatctcgttgaaacggtcggcgccgatgccctgggttgcggcggtggcctgcaggcccgccaggcagcggctgaacgccggatcgttgctggcggcaggggccgcaggcagcgtcggggtcgacgcgagggcggccgccaggccgagcgtggtcagaatgggcatggcgtcctccgtgttgccgttgcacggccatcttaggggcagcagtgcggccgaacctgaaggggcaccggctggccgtcccccctaggcagcgcgcagcaggcgcaggccataggcgggactttcggcatcccaacgctgtgcgacctgcaggcccgcctgctgcaacagcgcctcgaagctgtcatcggtgtacttgtggctgtactcgacgcggatgggttcaccggcagcaaagtggaaggtgcggccaccgaggtggacgtcctgcggccactggctgaccaggtcggtttcgatgcgcagccgcgcggtgttgtaacgggcgcggtggcggaatccatcgagatcgaaatcgcttccgatctcgcggttgaggcgggccagcagattgagggtgaatgccgcagtgacgccctgcgcatcgttgtaggccgcttcgatcagcgccgtgtccttgtgcaggtcgatgccgatcagggccaggccgtcgcggcccatcgtctgacgcatcgcccgcagcagggcgacggcctccgcttcggcgaaattgcccaatgtggaaccggggaagaacagcagccgtcgcgcgggttcgcgttcgggcatgggcacggcgacggcgcgggtgaagtccgcgcagaccggcagcatctcgacctcgggcagcgccggcgccaggtggtcgatgctggacagcagtgcggcccgcgagatctcgatcggcgtataggccaccggatcctgcagcgcggccagcagcaacgcggtcttgcggccactaccgctgcccagctccaccacatgcaggcgcgggccgaccacgcgcgcgatatcgggcagcacccgcgccagcagcgccagctcggtgcgcgtggggtagtactcgcgggtctgggtgatctgttcaaacagacgcgagccgcgggcatcgtagaagtacttggaaggcagctgccgcgatgcgcatgacagaccggccagcgcatcggccaggacctgctggcggctgggggtcaggtcggtcagcgcctgcagcgcgtcatgcaccgtgctcatatgaggtccctggccaggcgcagtccggagaactgccagcgcgccggcggcatgaagaaattgcggtagctggcgcgcacatggccacggggcgtggcacagctgccgccgcgcagcacccattgcccgcacatgaacttgccgttgtattcgccgaggttgccgtcaaaagagcggaagcccgggtaggcaccataggcgctggcggtccattcccagacatcaccgaacagctgccgcagcccactgcccccggctgcctgcgggtgcaggtgatcgtcatcggcgaaatgaccgaggaggggctgcgacgcggcggccgcttcccactcgaactcgctgggcaggcgcgcaccggcccagcgggcgcaggcatcggcctcgtagtagctgaggtggcagaccggcgcatgcgggtccagctcgcgccaaccacccagtgtgtactcgcgctgcagggcatcatcccagtacaggggatgctgccagccttcggcttcacgcagcgcccaaccttcgctgagccaccagcgcggctcgcggtagccccccgcctcgatgaagctgcggtactcggcattgctgacggggcgttcggccaaggcatgcgcgggcagcagcacacggtgtggcggcgattcgttgtcgtaggcgaaggcggcgtgccggggccatgccgcggcaccgacggtgacgatgcgttcgggcgattcgatccagccctgcgccgtggcggtgctggcgacgggccgcaggtcctcgcgatacggtggctgcagtggattgcaccagaacgcatgcttgatgtcggtcaacagcagttcctggtgctgttgttcgtgctgcaaacccaactgcaggtggtgcagcgcctgcgcgtcgaggtcaccggctgccagccgtgactgcacctgcatgtcgatctgttgccggtagtcgcgcacctgctgcagcgagggccgcgacagcagcccgcgctgcggccgcgcatgcgccgggccgatgctcttgtaatagctgttgaacagatagtcccaggccgggtcatgcgcgggcgtggcgaaaccggccagcacgaagcgttcgaaaaaccaggtggtatgggccaggtgccacttgctgggactggcgtcggccatgctctgcagcatggcgtcctcggcactgagcggcgcggccagctgcaggctgcgcgcccgcacctgtgcaaagcggcgggcgagatcgcgctgcggggcagcgacggcggtgggtacgctgtccatgccggaagcatcggcgcaggacggtgagcgcaacgtcatggcaccacatcaccacgttcacatgacagcgggcacgcgcattcaagaagcgcgtggggacgccgctaacggcaatgttgcggccgcatcgtcaccgcactggacttaccgcgtgcccctgcatccgctccgccagcctgcgcattacctgttcgtgctgcccgccgtgctggtcgtcctggtgctgtggatggcgctgggcaccgaggatgtcgccagcccggcgcagcgcatcctgccctggctgctggcctgtctcggtgcaggcctggccctgctctaccaccagatgcgcgcgttgtgcctgctgctggtggtggcggtggtattcgccctgctgcaccgggacgtcggtggctacctgcgcagcggccatgtcgacgccctgaccccgctgcgcttccacgcgatctcggcgtgggtgccgctgctgttcgccggactggcactatggccggaacgcggacgccgacgccaggacctgctgctgcgcagcgtagtgtgcggcgcggcgctgctggtcttcctgctgctggcggcacagcagccgcaggggatgcacgatctgctgtcgaaccgtcactgggcctggattcccgccaactggaacgcgttggcgcagttgccggcgctgctgttcctgctggcgaccgcagcattgggctggcaggcgtggcggcatccgcggccactgcacacggcaatgctgctggccctgctgtgcctgtggtggatgctgccgcggatcttcctgcagccggtgctgctgccggcgctgagcagtgccgccctgctgctgatgctgggcgcgatgctgcaggaatccttccacatggccttccgcgatgagctgaccggcctgccggggcgacgggcgttcaacgagaccctgcagcgggcacgcggtacctacagcatcgcgatggtggacgttgaccacttcaagtcattcaacgacacccatggtcacgacaccggcgacgatgtgctgcgcctggtggcgtcgcggctggcgcgggtgggcgacggtggccgtgcgttccgctatggcggcgaggagttcgcggtggtgttcctggaccggccggcggcagcctgtgtcgatgccgtggaagcattgcggcagagcgtcgaggacacccgcatgcagcttcgcgaccgcagcacccgcagccgtgacgacgaagccggccgccagcggcgcggacgcggtggcagcggtcaggtggtgcaggtaacggtgagcatcgggctggccgacagccgcgtggatccgcggccgatggccgtggtcaaggccgccgaccaggccctgtatgtggccaaggacgggggccgcaaccaggtgcgcgcgcacggcggccagcgcgttctggcagcgcacagcgcgtagtgctcagaccgcgtcgaggtagtaccagcggccgtcgatgcgttggaagcggctgtgctcggtcatcctcaccgcgctgccgccgccgatgcggtagcgcgcggtgaagcggacttcggcgctgtcagcaccagtgacagtgtgctcgtgcacggtcaggcccagccaatgggtgcgctggccgggggcatcgtccagcgacagctcggccggacgcgtgtccggatgccaggactggcgcaggtagtcagccaggccacgcacataggcgctgtagcgcgaacgcatcaggtgctctgcatcaggcgcggcttcaccggcatggaaacggccacagcaggcggcatagtcggcgggaaggccacaggggcagggatcggcaggttttcggctcatgccggcattgtcgccgggttgccgggattgatccacgcggggccgcagtcgcccggagcaggacaggcgtatgctgtcgcgccccctccttgattgatcgccgtgctggaactggttccccctgagttgtggtggctggtggtgatcgccttcatcgccggccttgtggatgccgccgtcggtggcggtggcctggtgcagctgcccggcctgttcacggtgctgccgcagcagacgccggcgatgctgttcggtaccaacaagttcagttcgatgttcggtaccggtgcggccgcctggcgctatgcgcgcaacgtgcgcttcccgtggaagccggtactgttcgcggccggtaccgccttcatcttctccttcgccggggccaccgcggtgagcctgctgcccaaggacgcggtgcgcccactggtgctggtgctgctgatcgcgatgctggcctacacgttgtggaagaaggacttcggcgcgttgcaccggccgcaggagatcggccgccgcgaactggcgatcgcgctggtgatcggtgcggcgatcggcttctacgacggcttcttcgggccgggcaccggcagcttcctgatcttcctgttcgtgcgcttcttcggcctggatttcctgcgtgcgtcagcggcgtcgaaggtggtgaacctggcgaccaatgtggcggcaatctcgttcttcgtaccgaccggcaacatcctgtggctgttcgcgctgccgatggcggcggccaacatcatcggctcggtggtgggcacgcgcctggcgttgaagggcggcacgccgttcatccgcaagttgttcgtggggctggtggtggtactgatcgcgcggatggcgtgggataccttccgcggtgcgtgaatgcggttgccggccagcggccggcactaccgggtcatgaacgctgcccatgggtaatgccggccgctggccggcatccccatccgatcgggtcgtgaaccccgcccatgggtagtgccggccgctggccggcatccccattcaatcgaccgggtcaggcttcggcttcttccggttcgttggcctgctggcggctgcgctcgggcagcttcaggcgcttgccttcttcgtcgtactcgatcagcagcacgccggagtcgtggcggccgctgatctcgacgaagcaggcgccaccgatgaacggctccagcgtcatcaccgacttcagcggagtggcgaccaccatctggaaaccgaagttgtcgaagatgttcatcgccagcgcggtgaactcgttgtcggccttgtcgaaggcttcgtcgagcacgacggcggcgtagctgggcagctggctgtcggcgccgccgagctggtagcgcagtgccgcagccaggcaggtggtggccagtttctggcgctggccaccggacttgcccgcgccactgcggtagatctcgacctgctggcgcgtttccgcatccagctcgacgccgatgaactccacgtgcatgcgtacgtccagcaccagctcgcgccagcgcttgtcctcgccttcctgcgaacccaggcggttgaccagctggcgcagcacggtgaactgcgattcggccagctctcgctgctcggtctgctgctgcgccagcacctcgcgcagctgcaggtggaactcgccgacttccggcaggcggcggtcgctcagttcgatggtcagcagcgtgccacggttgaacggcacctgctccaggctggcgttcacttcgtccaggcgctggccgatcgacttgcgggcctcggcgctgtggcgctgcagggccagcaggttgttcttgctctggttctgcagcagatcgaagaagcgctcttcgtgctgcggcaggccgtcgcgctccaggcgctcgaggcgggcaaggaaatcctcggccgaggccaccgatacggtgaagtcgcccgattcctccggccactgctggatgaagcgacggaagcaaccgatcagctggttctcgatgcggttgaggtcctgctgcgaggtcgacagctgctcgttcagcgcgttgctgacctggcgcatgtgcgcctccagcgtttccaggctgagcgggccctgctcctgcaggcgctcggcgagcccggcttcctgctcctggccaaggctcggcagcaccagcgcacggctctgctggcgagcgcggtcgaggcgatcgcgttccttgaccagctgcccgcgctcgacgcggacgtcttcataggtgcggcgggcctgctcgatgtcggcgcgcacggcgtcgatctgcttggccagcttggccaggtcggcattgccttcgcgcaggtcgcgcagggtggcctcgatatcggtcaggcgctgctgcggggcggcgatgtcgatctcgttccagctgatgctgaccagctcgtggcaggccaggcgacgttcgttgtcgcggtcacgctgcccacgcaggcgcgcgatgtcggtctcgcagctggcgatgcgcttggccagttcctgggcttcgcgctcgaaggcgcccaccttgtcgtggttgttgaagccgaggatccagcgacggcggtcgcccaccgcactgcggtcgtccttctcgaagcggtcgccgggatgcttgacctggccttctcgggtgatgccgcggtcgacgttgcgcagctgcttggcatccacgcactcgtagtcgaagcgcttgccgagctcacggcgcagccagctttcgaatacgtgctcgcgcagctccagcttgtgcagcagcgacttcgccgacggctcgcgcgcgaacgcatcatcgttgcggcgcacacggtagtaggtgaagcgcatgcccaggtgagtgcgattcacccactcggcgacgtcgttgtagtgcttgtcatcgaccagcagcgacagcgcgaagccacccagcacacgctcgatggcaccctgccagccctgctcttccgagcggacctggatcagctcgccgacgaacggcagcgccgcctcggcaatgccggtttcctcggccaggcgcgcgcgcagcttctgcatcggcgccgggatgttggagggcgtgcgctgcatcgcttcgagttccgcacggacttcgccgaaacggcgctcgtcatcgcgcttgccacccaggcgatcgctgatcgcatcgtccagcgccgaagaggcacgctggcggtcctgcagttcgttctgcgcacgctcgaccagctcggcgaagccgtgtgcgtcgtccggaagttcagccccgagctgctgcgcggccaggcttgcctgctcgcgcttggcttggcggcggtcacgctcggcttcggcgcggccctgctcgcgttccagttcctcgatgcgctcaccgccctgctggcgacgctgcagttccagttcggccaggcgctcggtgtggttgtccagtgcggcacggcgctgggcttcttccccgagcaggccacggtcacgcacgtccatctcgcgcaggcgcgcctcgatcagcgcctggcggcggctttcacggaagctgtcgacgccaagcttgagggcttcgtcgtcgccgcgccggcggtgcatttccttcaggtcgttgtagtaggcgcgtgccggcagcagggtctccacctggcggcgggcggtgaccacggcctggtgcgcgccatcgagttcggcgaagtcgctgaccaggcgctcggcggcgtcgaaggtcttcggcgtgtcgagcatgaagtcgcgcaggaagacgttgaggtcgcccaggttcttcgccgactgcgtcttgtgcagcaggcgcagcgccatctcgttgtcgatgccgagcaggtcgcggaagcgctcggcgtagccggagaaggtgtcgaagtggtgcaggtcggacagcttctgcttgagcttgcgcaggtccaggtcaaagccgccaagatccttggcgatgtcgaacggacgctcggcgatcatgtagtgcttgcgcacatcgccggccgaggtgccgttaccggagatccacagcaggcgcaccaggctgaccacgcggccatcgccggcgcggtactccagcgccagcgcagtccaggtcgcgcccttgcgaaggtactgggtggcgatttcgccggtgccgctgtcctgctggtcggcccacgcgccacgcacgtaggacaccaggttgcggtcgcggccactgcgctcggcttcacgcgcggcggcgttgaaatcgacgatggccggcggcgtcagcagcgcggacatggcatcgagcagggtcgacttgcccgagccggaacggccgacgaacaggaagccacgctcggcgatcggtacttcggtcagtccgttgaacgtgccccagttgtgtacctgcaggcgacgcatgcggaactgctgcaggcgcgggtccggcaggccttcgttgaacagggcgggagtgtgcttggagatagccatgcgatggtcgggtctctcaggcctcggcggccggggtttcacgcagctggcggtagaccgccgaaagctgggatacgtcttcggcggagaacagcagcttcagcgccggcgagacttcgtggcggtcgtcctggccgctgaggcgggtcaggatgtggttgtccttcatcttctgcaccgccgaggcgacacggcggttgaagccggcgcggtcggtggacaggttcttctcgtagatggccagcgcttcggccatctcggcgtcggcgaccaccgcgcggttgccgcgcgcatcggcctcggccagctgctggcgcaggtacagcagcagcaccgaatcgatgaaggtcagcggcgaggtgcgcagcagcaccggcgcatccacgtcttcggtatcggcctggcgggtgaaggccacgccgctgtcacggtcgagcaccagttccaggaacaggtccgccagcgaggagcggatggccgcctcgctgcggatcagtgccggccacagcttggcgtggcgcagctggtcgatgctggggccgatcagcagctggcacagcgcgcggcgtgcatccagcggcaggcgcccggtgtcgccgaggtaatacacgtcattgccacggcggggctgcgccacggccgccaccggttcggcttcgtaggcgtcttccgccacgtcggcctgcggtgcgtcgatgggatcttcatgccagctcatggcgtctctcctgggtgaaccaaaccagcgggatgcgggcgcgacggacctggccgtcgccaccacgccattcggcaagctcctgctcaccagcgatcacgttgccgaagcgcgtgcccagcgacaggtagccgatgacgctgccaagaccctgcggtgcttcgcgctgcgacagtgcctgggcgatgctgagccgcggctgtgcatcgagcaggtcgtgcaggtcgcggcgcagggtgcggaagtcgatttcagacgaagcgaccagatcaccgacgctctccaggctgatggctgcggcgtcgttgtactcgacgttgccatcgacctgggcgctgcgcggatcgtgcagcttccactgcgaccacgagcgcaggcggctggtggtcagctgcaggtcgcggccgatgccgcgttgtgcggggaattcgtcgcgcagggccagcgcttcggactgcgcctgcttcagcagctggttgaggcggcgctgttccagatagccacggctctgcacgaagccacgcaggctgcgcgcgaaattctgcagcacgtcgtgcacctggccaccgcgctcgagcatggtgctggtgaagccgcgcaggaagttgcgttcattgcggtccaggcggcgggcgaagccacgcgccagcaccgcttccagcgcggcatcgagctgggcgctctgttcggcgtcgttgagcaggcgccagaaggcctggaagctgcgaccggcatcgctctcgccgatcacatccacgccttcgaacagctgcgacagcacatcgccgcgctcgccctcgtcgtcgatgatgcgttcgcggaagtcgcggttgagctgctcgaagtcgtcgcgcacgcggcggaagtcctcggtcagctcgtcggccaggccgatgatctggcgcgcacgttccagcgcgcgcttgccatccagcgcgatcacgcggccggcgccgacgcgggcgatctcggcgtcgatgcggtcgcgctcgtcgcgcagtgctgacaggcgtgcatccgggtcggactcggtctgcgcggccaactgcgagagctgttcgatgaccagcgccaggcggctttcggtggcggccacgcgggcctgctcgaggccatcggcgaagcggatggcctgcagtgccgcggtcgacagctcgtactgctcctggtcggcgccttcgggcaggcggcgttccagccagccctgggccagccagtgcgcgatgtaggcctgcgcggtacgcggcagctcacgcgacagttcgtcgccgttgagctggtccagcgcacgctgcaggcgctcgttgagcaccgacgacggcagcgtgcgctcgccgtccatcagcagcccctgcagcaggccgatgatttccggggcgtggtcggcggcaagcagcttccactggggctgttcgcgcagatggcggtaacgggagatgcgttcgcggtgcttcatgcagcgaaaggagtcatgagggctggcggggacgagcagccgcccgcggcggccgcgcgggcagccgtgggcatgccggcccgcagaggccggcgcagtgcggtcaagcggctcagcgcttgccgcccacttcgatgaagcgcaggaactcggcgcgggtacgcgcgtcgtcgcggaagctgcccagcatcttcgaggtgaccatgctgacgccgcgcttgtggatgccgcgggtggtcatgcattcgtgggcaccttcgacgaccacaccgacgccgatcggctgcagcacatcctggatgcactgggcgatctgcgcggtcatcttctcctgcacctggaaacggcgggcgtaggcttcgacaacgcgggccagcttgctgatgcccaccaccttgccggccggcaggtagccgacgtggacgcggccgatgatcggcgccatgtggtgctcgcagtggctttcgtactcgatgtcacgcaggacgatcagttcgtcgtagccggccacttcctcgaaggtccgctccatgtaggcgcgcgggtcgtcgcggtaaccgctgaaccagtcgccataggcttcggcgacacggcggggggtatccagcaggccttcgcgggacgggtcctcgccggcccagcgcagcagggtgcgcacggcatcctcggcctggtcctgggtcacgtcgccctgcggggcggccttttcgttgttcttgctcattgcgtacagcgtcccgaacggggggcgagcatcgtacccgaccggggggtgggtcgtcctgttggtcgggttcatcgggggtctcttgcagcgcctcggtgctgctgagcgagaggaggaggggcaggccgggcaggacacgccgcaagtacgtccctgtaggctcggccacggcatccatgccgtggacggtcctgcccggcctgcccctccccctctccgacggtttcctgcgggcgcggccggaccgcccgaaagcgggggcaaaagcgggggttcatggcttcggaagcaccgcgggccgctgctgcggtgggtgcgggccgttggtccgcactgctcctgcctttaaagagccaacccaccacgctcgcggggtgatgggagggcagcgggggccgggcggggcaggaccgtccgcggcatggatgccgcggccgagcctacagggacgtacttgcggcgtgtcctgcaccgtccggcccccgctgccccacccgacaccaagcgggcgcaacgctttcctcagtattcctgcccacccattcagcaatacctattgataggaatgaaattagtagtatcctatctatctcttatgaaccgacccctcgacgagcgcaccgtgctgcagatgcagctcagctccggcctgctgtacgcagggcggcagtggcagcgcctggccgacagccggctcggcagctacggcatctccaccgcctgcaccatgcccctgctgatgatcggccgctccggcggtggcatccgccaggtggcgctggcccagcagctgggcatggagggtccttccctggtgcgcctgctggacaagctgtgcgccagcgacctggtccgccgcgagagcgacgccagcgaccgccgcgccaacctgctgtggctgaccgacgcgggccatgcgctggtcagcgagctggaagaccagttgatcggcctgcgccaggacgtgttcggcgagctttccatggatgaactgcacgccgtgctgaaggcatggcgcctgctggccgaggccgccgaccgcatcacgtaagaccgctgcccccgaataccgccgctgccgtgcacacgccagcggcttttacccgttgctgctgtttcgttgttcctcccctcccccacctcgcccccgcccctaccgatgcccggtgaattcagtctccacggagtgttcgtcccgaccctgctcgggctgatgttgttggcctacctggtcaacagcggcctgcacgcgctgctgcagcgtgccggcgcctatcgccacgtatggcacccggcgctgttcaacctggccctgtacgggatcgtgcttggcctgctgttccacctcctgcgttggatgcaatcgtgaacaagatcgtgaagaagaccctgccggtgctgctcaccaccgcagccgtgatcatcgccctgctggtgctgcgccagctgtgggtctattacatggatgagccgtggacccgcgatgcccatgtcggcgccgacgtggtgcaggtggcgccggacgtgtccgggctggtggaaacggtgcaggtggccgacaaccaggcggtgaagaagggtgacctgctgttcgtggtcgaccgcgcccgctaccgcatcgcgctggagcaggcccgcgccaacctggccgagcgccaggcatcggtggcgcagctgcgccgcgagatcggccgtgaccgcagcctgcaggacctggtcgccgccgaggacgccgaagtgcgccgcgccaagctgcaggccgcacaggctgcgctggccaccgcacaggcggcggtcgacctggccgagctcaacctgggccgcaccgaagtgcgcgcaccggccgatggccgggtcaacgaccgcaccctgcgcgtgggcgactacgtggtagccggcaagccggtgctggcgctgctggataccggctcgttccgcatcgatggctacttcgaggaaacccgcctgcgcggcgtggccccggggcagcgcgtggacatccgcctgatgggcgagtcggccccgctgcgtggccatgtggagagcatcgccgccggcatcgaagaccgctaccgcagcaacggcagcaccctgctgccgaacgtgaccccggccttcgactgggtgcggctggcacaacgcattccggtgcgcatcgccatcgacgaagtacccaagggcgtggaactgatcgccggccgtaccgccacggtgaccgtggacaccggccgccatccgcacaacgacaaggccggcactgcgccgacacaggcgggcctgtgaacgccgccctgccccgtctcggcctgatcgttgcgctggccagcctggcggcctgcaagaccgtcggcccggattacgccctgccggaaggctcggccttcaagcgcccgcaggccaatgcggccttcatcgatacgcagaacccgcaggtggccgccaaccaggcgctgcccgaccgctggtggtcgctgtacaacgacccggtgctggacggcctgatcacgcaggcgctgcgtgacaacgtcgagctgaaggccgccgatgcacacctgcgccgtgccgcggcggtgtacgagcaggcgctggacgccggtggcttcgagtacgaggccgaggccggggtcagccgcgcgcagctgtcggccgaatcgttcctgcaggagcacgagctgccggtgatcaacctggccgatggcaagttcgcggtcagctaccagttcgacctgttcggcaagctcaagcgcggcgccgaggcagcgcgtgccgacgagcagtccgttgctgccgcgcgcgacctggcccaggtcagcgtggtcgcgcaggtggccgacagctatctggaaatctgccatgccaaccacgagctgcacgtggccgaacattcgctgcagctgcagcaacgcagccgtacggtcaccgagcgcctgatcgcggctggccgtggcacgccgccggaactggcccgcgccaatgcccaggtggcgctgctggaggcggcactgccgccgctgcgcgcgcagcgttcggcggccgcctattcgttggccgcgttgctgggccagaccccgggccagctgccggccggcgtgatcgactgcgcgcacgcgcccagcctggcgcagccgctgccggtcggtgatgggcgtgcgctgctgcagcgccgtccggacgtgcgccaggccgaacgcaagctggcctcggccaccgcgcggatcggcgtggccaccgccgagctgtacccggacatccgcctgggtgcctcggtgggtgccgccggcctgctggaagacttcggcacgccgatgacccagcagtggtcgatcggcccgctgatctcgtggacgctgccgtcgtccggcacgcacgcacgcatccacgccgccgaggcgggcgccgatgccgcgctggccgagttcgaccacaccgtgctgcaggcgctgcgcgagacccagacagcgctggaccgctatgcgcaggacctgcgccggctgcagtcgctgcgcatcgcgcaggagcaggccgcactggccgccgagcagaaccgccggctgtaccagggtggccgtacgccgtacctgtccagcctggatgccgaccgcagcctggccaccagcgacgccaccctggccgccgccgaagcgcaggtctcgcgcgaccagatccatctgttcctggtgctgggcggtggctggcaggcaagcgccaccgcgcccaacgcctcgaccgcagcgaagtaaaccatgaacgcgctgaccgaccgccaggcctggctgttctcgatcaagacctacctggccgcagtggccgcgctgtacatcgccatggccggcaacctgtcgcgcccgtactgggcgatgggcacggtgtacatcgtcagccagccgctgctgggcccgacccgggccaagggcgtgtaccgcatcgtcggcaccctggtggccggcctggccaccctgctggtgctgccggcgctggtggagacgccgctggtgctgagcgcggccatgtcgatctggctggccggctgcctgttcatggccctgctcaaccgcggcccgcgcggctacgcgttcctgctggccggctacaccaccgccttcatcggtttccctgcggtgacttcgccggagaccatcttcgacacggtggtggcacgcagcgaggagatcatcctcggcacggtcgtggcggtgctggccgcttcgctgctgttcccggcctcggtacgcccgatgctgcgcgcgcgcatcggcaactggatggaggacgccgcgcagtggtgccggcagatccttgaacgtggacgcgcgcacgcgccgcgcaaccggctggccgccgacctggtgcagttcgaggcactgatcgaattcctgcgccgcgatgatccgcgccatgccgggtctgcggtgtcgatggagcgcctgcgtgagcgcatgctgctgctgttgccagtgctgtcctcgattgccgatcgcctgagtgcgctgcgcagcgacggccaggccctgcccgaagggctgccggcgctggtcgatgacatccacgattggctggatggcccaaccaacgccagtgaatacgcccgcctgcgcgcgcgcatcagtgccctgaagccgcaggtggaccgcgacctgcagcatctgcagctggccagcctgctgctgcgcctggaggaactggtggacctgtggcaggactgccgcaccctgcagcacgccatcgaccacggcaccgcgccgctggaccgcgcgcattaccgcatccgtaccgaacgcgtagccgctgacaagcacgtcgactacggcatggcgctgttctccgcgctcagtgccggcgtggcactgatgagctactgcgtgctgtggatcgcgctgggttgggagggcggtggcaacggcgcgatgatggccgcggtgaccgcggcgttcttcgccgcgcaggacgacccggcaccgagcatggtgtcgttcctggtgtgggccatggtcgcctcggtggtggccggcgtgtacctgttcggcgtgttcccggccgtgcacgacttcggcctgctggcgctggtgctggcggtggcgttcctgccgctggggctgatgctgcaccaccccaagagcgcgctgttcgcactgccgctgacggtgaacctggccgcgctgctgagcctgcagaacacctacagcgccaacatccagaccttcctcaactcgtcgatcgcgatgttcatcggcattggctttgcggtggtgatgacccgcctgttccgttcggtgggtgccgagtggaccgcgcgccggctggtgcggcagggctggactacgctggccgaggccgccgaagggcgcggccagcaggaccgccagcgcttcgccgcacgcatgctcgacctgctgggcctgctcgcgccgcgcctggcggcaaccccggagggcagcgacatcgcctcggtggatatgctcaacgaagcgcgcattggcctgaacatcctgcagctgcgccgcgcgcggctggaactgcccgagcgcagccgcgaagcggtcgagcacattcttgaggagatcgccgcgcactaccggcggcagattgccgcacgcaagccgatggtggcggccgacgcattgcgcgagcggctggatacctcgctgggacgggtcggcagcgtagccgcctgcaaggcacgcgacgaggcgctgatgggcctgatcggcctgcgcttcgcgctgttcccggaggcgaaggcgctggcgccgggcctggccatgagtgcagccgaacagccgtagcgcgataccctgtgcgtccacagaccccgttgccggggtcgggtccttcgccgcggacgaaggctctgacccctgctctgcacaggaagctccaatgagttacgacatgatggtgttcgaggccagcgccgcgccacgcgaggcggcagccttcatcgcctggttcgaaaagcagacgcagtggaacgagcgccacgagtacgacgacccggcagtcagcagcgcggcgctgcaggcgtggttcgcggagatggcggaggacttcccgccgttgaacggcccattgagcaacgacgatgacgaccgcgccgaggtgaccgagtacagcatcggccagcaggtgatctacggtgcgtttgcctattcggtggccgagcgtgcgcatggccgcgtgcaggacctggccgagaagcacggcgtgggcttcttcgatgtgagtgccgatgaagcggcgatcgtgttcccggatgggctggtgttgatcgcggaataggtgcggcggcagggctgcgccctgcacctgccgaatcaacggcaacgtcaaatgcgcgctatccgtgggttggcggggcgggtccacgccatgcgtggatgaacgtcggaatgatcgaagtacgcatttgtagagtcgagccatgctcgactgcttttgcctggcgatcaggtgaaggggtcagaacccgttcccggtgggaacgggatccgaccccgattcagaacaactggccctgcaccgtgggctgttcgaggcgcgccggtgcttcggccaccgcttccgcacccagccgccaggccaggccacccaaccggctggcgtggcgtttcaatgcggcctgcagcacctctgcgctgcccgccacatgcagcacctggcgggcgcgggtgaggccggtgtagaccagttcgcgcgacagcacgcggctgtcctggcgtggcagctgcaaccacacttcatcgaactccgagccctgtgccttgtgcacggtcatcgcaaaggcgctttcgtgcgcgggcagtgctgcggggtggaaggcgcgcggctgctcgacggtgtcgccggggaaccaggccaccatcgcgccgctgcggtcgcgcaggcagatgccgatatcgccgttgaacaggcggtgccggtagctgttctcggtcaccagcagcaggcggccctggaagtagcccggggtgttgccggccaggagttgctcgatacggctgttgaggccacgcgcgccctgcgggccttcgcgcagcgcggtcagcacgcgcagtcgcccggcctgctgcagggcaagcaccggatcggcggcgtcggccagtgcacgccagtggcccagcaggtgctcgcgctggccgcgcaatggatcggcctcgccttcgtggaaatgcacgcctgccagcgacccaccgcgcagcagctgcaatgcggtgctgctgtcgccttcgcgcacggcatgcgccagtggtgccaggtccagcgcatcgctttgccggtaaccacgttgcagctgcacgcggcggccggcgaaggcgcgcggcgtggcctggggctgcaacgtggccggtgccaacagaccctgcagtgcctgcgcatcatcggcgcgggtgccgatgccatcaccgctggcgcgcaggatcgcgctgagcacatcaccggcttcgaccgagggcaactgatcggggtcgccaagcaggatcagccgcgtgccgctggcgatcgcatcgaccagcttggccatcatcggcagatcgatcatcgaggcttcgtcgaccaccaccacgtccaccggcagcggattgtcggcgtggtggcggaagcgcggcgaatccgggatcacgccgagcaggcgatgcagggtggtgccggaactgggcagtgccgcgcacagcgccgggcccacgccgtgctcctgcaggcgctgcacggccagccgcaggctctcggccatgcgttcggcggcgcgcccggtgggcgcggccagcgccacctcgggcagcggctgaccagcgtgccgggcctgtgcggccagcagcagcaacagccgcgcgatggtggtggtcttgccggtgccgggaccgccggtgaccagcgccagcggatggcgcagggtcacgccggcggcgcgtgcctggtgatcctcgctgcccagtgcctgcgggaacagctgcgcgaacaacggtgccagcgcggccatgtccggtgccggcagcggatgccggccgatgcgctgcagcccggccgccaactgccgctcgtactcgcgatagcggcgcaggtagagcaggccgttctccagcaccagcggcgcatccttggcgatggcatcggcctgctccggcgtcgctacccagggcgatgcgcgcagctgcgccagccagtcctgcgcggcaggccactcgggcacgccgtccagcaaccgctgcggctgtgccggatcaaacccggcgtggccctgcgacaccgccagcgaggcgagcgcggccgccaacgccacactgtccggcgtgtcgccgcgcaaccgctgcaggctggtcgccaacgcgtgatcgagggtgcgcagcaggcccttctggtgcagttccttcagcaggctcatgcgctggccccacgggcacgtgcggccagttcggcctgggcctgttcgccacctgcgaacagtgcgtcgagtgcatccaccagcgcgaacgggaagcggtccacatgcacgccgttgccggcagcatccaggccgcggcagaacaggtagcggatgccccccatgtcgcgctcgtaatcgtaggccgcgcccagacggaagcgcagccagcgatgcagggccacggtatagatcagcgcctgcaggtcgtactcgctgtggcgcatggcaatggccagcaggtccggactgtagccgggcagccggttggatttgtagtcgagcacgtaccagcgcccgtcgcgcacgtaggtcaggtcgatcatgccggtcatcagcccttccaggcggcggcgctggccgaagccgcgacgcgcactggaaaccccatgtgcatgcagcagctgcaacagcgccggtaccgtggtcggttcgatggcgaaatggaagtcgatttccgcgcgccgctcgccttcgcccaggctgtgcagcgcaccgccctcgggcagtggcacggtgagcgtgtggccgaccaacggcaccagcaccgccacgccatcgtccaggtcgacgtcggcatagccttcatcgtgcagcgccttgcgcagcacctcggcctggccctcgggtgcttccaggcccggctgccagcccccccacgcagcgaagtcgacgttctccatcgcctcgtgcagcacgttgccgaagcggctgcccatgaagcgcgggtcgaccggcgggctgtcttcgacggcggcgggttccggcagcgcgggctccagcggcagttccgggcccgcgggttcgtcggcggcgggcgccggcagctcggtggcggcggcttcaatatcactgccagcgcccgcgtcggcatgcgccagctgggtgaagctgtatacccaccagtcgtgcggcacgcgccgggtcagtgcacgcactgccggaagatccccttccacttcggccgccagctgcggcagcgcggccactgtctcactgtcatcgatgtgcacgtcggcgtgcgcgcgcagcgcctgcaggtcgcccagcagcggcgccaggcgcgtcttgccaagcccggccagatcacccacggcgatccacagcgcatgctcggcgcgggtcagtcccacatacagcaggcgcgcatcctcggcccgctgctcacgctcgcgctgtgtgctggccgcttcccaggcctcgtccctgtccagcttccagtgcagctggcgctggccatcgacgtgcacggtgcagtgcgaggcggtgttcggtgcgccgccgtcgatgccgacgaagggcaggaacaccagcggatactccaggcccttgctcttgtgcagggtgatgatctgcacgcggcgtgcatccgattccaggcgcagcaactgctgctcgtcatcctggtcggcgctggccatctgcccctgcagccagtccagcaggccatgcatgcccagcgcctgcgccgaggcttcctgcagcagttcgcccagctgcaggtagttggtcaggcggcgctcgccgtcgatcagcgccagcaggcgttcgccgtgcgcggcacagacatcggcgatcaccgcgaacggaccaccgcgctgccagcgctcgcgccagtgcagcagctgcgcctggaacccgcgctgcaggtcgccctcgcgctccatcgccgcgatcgcactggcccgctggcccagcaacaccgtggccagcgctgcacgcaggcggccttcgtctgccggttgcagcagcgccagcagcagcgcgcgcagatcacgtgcctcactggtggcgaacaggctctgcttgcccgccgccactgcgggtatgccaaccgcagccagcgcgcgctgcaccagcgtcgcctcgcgatgcgagcgcaccagcaccgcgatatcaccaggctgcaccgggcgcccacgcaacaccgctttgcccgcacgcgcctcgaccagggcctggtggatcgcagccacgcaggcctgggtcgctgcctcacgcgaggcatcggcactcatcgccttgtcacccccgctgcgcagcacgcgcagggtgagtgccttggcggcgtggccgtcgtgcagatagtcctcatcggtgcgcacgccaccgggacgcaccggctcgaactggatgtcacgctcgaggaaggcgtcctcacccccgttgtcgtacagcgcctgcaacgcgcgcagcactgacggtcgcgagcggaagttctggtccagcaccggcgcctgctgcgccacctgcttggctttcaggtaggtgtggatgtcgccgccgcggaacccgtagatcgcctgcttgggatcgccgatcaggaacagcgccggtgccaggccgagttcgcgcacctccggcgaattgccgaacacggtgtggaagatgttccactggcgatcatcggtgtcctggaactcatcgaccagcgcgatgcggtactgcgcgcgcagctgccttaccagcggcagccgctgcgggccttccagggccagtgccacgccatcgatcagatcgtcataggtctgcacccggcgcgtgcgcttcagcgcctgcaggcgctgcatggcttcggcgcgaagcgcgtgcaggaaattcagcgcggtaccacgcagccaggcatcgcgttcggccagcagcgcgacatagcgcgccaacggcacctgcactggcgacgacggcgtgcggtcggggaacttcttgttggtcttgtcggccagcacctccggcagcagtgccggcaggcgctcgctggccagcagctcgcgcgggtcgccccgctcggcccaggccagcagctgccggcccagcgtgtgcagccaacccagcttgtaggacaccccgttgatccacttgttgtcgacggcatcgcagaggtcgatgaagaactgctcgccatgcccgcgcagcgcctgctgcagttcggtggcggcggcccgcaatgccggctgtggatcggccagcgccaccggccgtggcaacgggcgcagaggcggcgcagccagcaacgcgcgcagatcggtggccagcgcgtccgggttggaccacagccaggtcagcggctccagcgtggccgcgtcgttggcatgcacccgccacagatcggccgccagttcctccaacagctcacggtcgctggccagtagttccggcggatcgaaggtatggccgctctccagcgcatgctcgcgcagcacgcgggtgcagaagccgtggatggtgaagatcgacgccaggtcgatctcatcggcggccacctgcaggcggcgcttcagtgcggtggcgctctcggtgcccccctgcagatggcgctgcagcacctggcgggtcagcctcgtgtccggtgcttcgccctcggccggttccaaatcgaccaggcgcgcggccagcgacaggcgctcgcggatgcgcttgcgcagttcctgggtggcggcatcggtgaaggtcaccgccaggatctggccgatgcgcaggccctgctccaccaccaggcgggtgaacagcgtggccagggtgaaggtcttgccggtaccggcgctggcctcgatcaggcggataccatccagcggcagggccagatagggatcgcccgccatgcgctgggagtcctcatcgacgatggcggtgctcatgtgctgccctcctggcgtgcatcggcgccaagggtgcggccttcgcgcaccgcgctgaagaccacctggctgttgcgcagcagatcggcatagccggcgtcggtggcaaatggatcggcaccgcgcagcagcagctgccaggcgtcgctgctggattcaccccaactgcggtcgctgccgtgccactgcttccagccttcgctgcgctgcttttcggccggcgcgttgtacagcacccagccggtgtagggggcaaagcgcagcggttcacgcagtccgcgttggcgcaactgcagcaatgcgcgcaatgccgcgcgtgcagcaggagcgctcagtgccggcagtacatgcgggccgggaccggcgtcgccgccatcatggaactgcaccagcggcagggcatcgccggcagcgttggccagcagccaatccaggccctggcggatcaccgcagtgccattgagggtgccagcgcgcaggcgcaccagcccgtcggggtgtcgatcggccacacggccatgcaggcgcacgccatcgatctccacttcatagcggcggctttccagcggctcgccccgcatccagcccagcaatgcactggcatacgggcgggtcttcaactgctccacctcgaactggcgctcgcccagggggcccgacggcagcaggccacgcgcgcgcagccgcggatacaacggctcggtatcgccactgagcgtggcgcgtaccaccgccgcctgcacgctgcgcttttccggcccgcgcgaggacagcaccagcggttccaggtcatcgacctcctcgacatcgtcggccaggcgcaggcccagcgactgcgccaggaactgcccggccggatcgcacaggaagcggcgcagggtatcgagtgcaacgtcgtcttccaccgcatcgtcgagcggcggcaacgcggcatcgaaccacggctgcaggcctccgcgcgcgccggtgaggcgaccggcggccggatgccattggcggcgatagctgaagcggcgtggatcaccgtcaccgaacgccgccggagagaacggctgcagtgcgtggcgcacggtgaagtcgcggaccgccgcaggcggatcgaggtgatacgcggcggcggcatcgatcagttcactgaccagcaccgatggctcacgcgcgctgccatcgcgcggatcggcaccgaggtagctcaggtagaacacctcctgcgcggcggcgaacagctgcaggaacaggaagcggtcgtcttcgcgggtggagcggtcgccgggccggcggcgcggcgtgtccagctcggcagtgagctggttgagaccggcagccgggtcacggcgcgggaaatcgccatcattgagaccgagcacgcagatcacccggaacggcagcaggcgcatcggcaccatgcggccaaagctgatgccaccggtcagcagcggcgcgcgcgtatcggcctcgcccagtgctccggcgaagtgcgcgcgcacgacctccggcggcaccccgtccgtgaagccggccttggcggcatcatcggcgaactggttgagcagcttgcgcaggcgctccagggcacgctggctgttgggcgaactgggcgcagtcggcagcagcgcgtccagcagcgacagcaggcgttgccgccactgcgccggcgtcagcagttcgccgaggcggcgctggtagaccgccaacacgcgcaacaggcgcagcagccggtccagggcgtccaatgcgccgccctccagctcgatccacggggcaacaccggccaggtcggcctcgctgccggtggcatgaccgagcaccaggcgatccagcgcgaactgccaggtgtaggcgtcgtcggccggggcctggtgctggttgcggtgcttcgcatccaggccccagcgtgcgccagcctgctgcagccagccatgcaggcgatcaaagtccaccgcctccagcccggccgcttcggccagcggcgcgctggccagcaggtccagcacttcgttcaggccgaaacgcgagaccggcaggcccagcaggtgcacgaacacgtcggccagtggctcgccggcgagcggactgctgtcggccagcgcatagggaatgtgctcgtcctcgcccccacggccgccgaacactgcttccagatacggcacataggggtcgatgtccggtgcaagcacggcgatctcccgcgcctgcagcggcgggtcgaagcgcgggtcctgcagcaggctgcgcagctggtcgtgcagcacctgcagttcgcgcaggcgggtatggcaggcatgcacctgcaggctgggatcgtcgctgcgcagcccgtcgcgcagctcgcccgagggcagcgcacggcggtggaacagatcgcgctgcaggcgatgcagcaggctgtcggacagtccaccttcggccagcgtcggccgggtgtcgtcctccggatccgaatacgcggcaatctcgccggccgggtgcaccacctcgtagctgcccagcaccgccatgaaatcgcgcccggccgcgccccaggcttccagcaggcggttctcaccggccgcttcaccgaagggatcgggcgcgccgctgcgcaggcgctcggccagcgtctgcaggtcaccccagtacgactgcaccggcgtgggcatatagaagtgcagctcgcccacccgcgcctgggtggccatcacccgcagcacatcgggcgagatgttgagcgtcgcgaacgcggacatgcgtggtggcaggccctgcggcaacggctggccggcgccctcgaagcggtccaggtaagcctggatgcggcgcgcgcggtagtcgtggccagcggcgatgctgcgccagaggatggcctgcgggtcggccgggtcggcgccggcctcccagcgcagcagccagtcgcggcgccaggcctggtacttctcgaacaccgacgccagttcaccggccaacgcccacggcttcaatgcatcgctaccggcaagataggactgcagcgcgcgcatcggtggctgcgccagcaacgccgggtcgcgcagtgcctggtacaccttccagtgcaggccggccgcgtccaggtcgtcgcgttcgccgggcacattggcgttgagtgcacgggcaacgaactcgcccggggtcaggaactcaagattggcggccacgccatattcagcagcgagtgttgcttgcagccaacgccgcatcgccacctgcggaatcagcaccacctccggcgccagcagcggctgacccgcaaccggcgcacgcacgttgcgcgccagcagcgcggccagcacgtccagggagttggaatggtagaggcggaaatcgctgcccgggtcactcatcatgcacagtgtgcagcacggcaggcagtattcaatggccggcccatcgccggtacggattgttccgggctgccggccgattatcccggcctggcagggatcttgccgtgccacaatactggaccgtccagtctgcttatgttcagccgacgggcccgatccttcgatgtctaaaaaacgttaatggtgcccatgtcggcttccacctccagtctggtgcagttatccaacgtccgcatcgaccggagcgggcgcacgatcctgcgcgacgtgtcgctgcaggtgcccaagggcagcatcacggccgtgctgggtccgtccggcagcggcaagtcgaccctgctggcggcactgaccggcgaactgcgcccggtggctggcgaggtcaccctgttcggcaagccgattccgcaggacagcggcgcgctgctggaaatgcgcaagagtgtgggggtactgctgcagggcaacggcctgctgaccgacctcactgtggccgaaaacgtcgcgctgccgctgcgcacgcatacccgcctgccgaccgccgtgctgcgccgccttgtggaaatgaagctgcatgcggtgggcctgctggccgctgccgatgcctggccgcgcgagctgtccggtggcatggcgcgccgcgtcgcgctggcccgcgcgctggcgctggacccgccgctgatgatctacgacgagccactgaccgggctggacccgatcgcctctggcgtgatcatgagcctgatccagcgcctcaaccacagcctgggcctgaccagcatcatcgtcagccaccacgtgcacgagaccctgccgatctgcgaccaggtgatcgccatcgccaatggcggcatcgtgttccagggcacgcccgaggcgctgcagtccagccaggacccgttgctgcggcagttcctgcacggccagcctgacggccccatcccgttcgatgccgcaccgcgcgcgagggtcgcctgatgccgttcgtccaagccacccgctcgctcggccgcgccggcctgttctcgctgaccgtgctgcgtggttcgctgccgacccgtgatttcctggccgagctgacccgcgagatctacaagatcggcgcgcgctcgctgccgatcatcgccgtcggtggcgccttcgtcggcctggtgctgacgctgcagggctaccgcacgctgaccaccttcggtgcggccgacgcgctgtcgaccctgctcggcctgtcgctgtaccgcgaactggcaccggtgctgaccgcgctgctgttcatcggccgcgccggcagctcgatcgccgccgaactgggcctgatgcgcgccaccgaccagatcaaggcactggagctgatggcgatcgacccggtggccaaggccgtggcgccgcgcttctgggcggcggtgctgaccgtgcccctgctgaccggcatcttctgttcgctggcgatcagtgccagctacttcgaagcggtacacgtgctgggcctggacaatggcgtgttctggtcggcgctgcgcaacagcgtcgatttctgggatgacttcggcgtggcgatgctgaagtcggcgatcttcggcggcaccgccgcgctggtcgccgcctacgttggtttccacgccgagccgaccatcgagggcacctcggtggcgaccacccgtgcggtggtcaacgcctcgctgctggtactgatgttcaacttcgtgctgtcggcaatgttgttcacctaacccctccaccggcggtgcgcaggcgcgcgcggccaccacgactcgatcaggtaatccacatggccatccgcggtcccagactcgaattctccgtcggcgccttcctgctgctggccctggcctcgctgatggtgctggccgtggcctcgaccaaccagcgctggagctggggcagccagggctacgagctgaaggcgcgtttctcccaggtcggccagctgcgcaagcaggcgccggtgaagatcggcggcgtcaccgtcggccaggtcgcctcgatcgacctggatccggtgaagttcgaatccatcgtgaccctgcgcatggacagcaaggtcaaggacctgccggcggacacctcggccggcatcttcaccagtggtttgctcggcgagagctatatcggtctgcagccgggcggtgacccggacgtgctcaaggccggtgacgagatcgtcttcacccagccggcggtggacctgatccagctggtcggcaagtacatgttcagtggcggcgccggtggtggcgcaggccagaagcccaacgatggcgcgcaggcgcctgcaacggaaccgcaaccatgaagatgaaactgatcccggccctgctcgcctcggcgctgctggcggctactccattcctcgcccaggcccaggccaccgctcccgcccccgccgctgccgcggcgcagggccaggccggcaaggtggtgatcgatgccagcacgcgcatcctcaccaccctgcagcagcgccgcagcgagttcagcagcaacccggccagcctgcgcagctacatcgacagcgaactgaaccgcaccttcgatcgcgactatgccgcgcgcctggtgctgggcccgcacgcccgcggcgcctcggatgccgacatcaagctgttcgccgatgccatggccgacagcctgatgcagcgctacggttcgaccctgctcaacatccagggcaagccgagcttccgcctgaagggtgaaagcccgctgccgggcaaccgtggcgtgcgcgtgagcaccgaactggtgcgcgccggcaatgaaccgaccccggtcgaatactggatgcgcaacgtgaacggtcagtggaagatcttcgacgtcaacatcgaaggcatctcctacgtgcagaccttccgcaaccagttcgataccccgctgcgccagaagggcatcaagcaggtagccagcgagctgcacagcggcagcatgcaggccgggcccgccggcaatggcaagtaacgcacttgcgctgctggaaggcgacaccctgcgcctgcgcggggtgcttgaccgtgccgcggtgatcgcactgtggccgcagctgcaggccctgccggccaagctggcgcggctggagctgggtgaggtcgagcgcgtggacagcgccggcctggcgctgctggccgagctggcggcccgtgcacgcaaggcgggccatgcgctggccatctccggcgcgcccgccggcttcaacgagctgagcgcagcctaccggctgtcgcccgacctggatttcaacgctacttctgctgcgagctgacatgaacgtcgtacgcactttccccctgatcctcctggccaccgccctgaccgcctgtgccggcaagcccgcgcgcagcgatgcaccggtcgccagcaccgtggttgcgcccggccccgctgctccggccgcaacggccgataccggcggggtcgacgctgctccggtcgcctccgtggccaaccctgccgagcccaccgcttcagcgccgacggctgcgccgcagggcatagaggccagcccaccgaaggccgcagcgtccaccgccgccgccggcgacgatgatttcgacgccctctatggtggtaccggcaacaccggcaacgcggcggcctacgatccgtgggaaccgttcaaccgcaaggtgcacaccttcaacaatgcggtcgaccgcggcgtggcgcgcccgctggccaccgcctatacccatgtggtgccgcgcttcgcgcgcaccggcgtcagcaacttcttcagcaacctgcgtgcgccggtgaccatcaccaaccagctgctgcagggccgtggtgccgatgcgtgggacagcctcggccgcttcctgatgaacagcacgctgggcatcggtggcctgttcgatccagccagcaaggcgatggtgccgcgtcgcaatgaagacttcggccagaccctgggtgcctggggctggcgtcgttcgcgctacgtggaactgccgttcttcggcccgcgtaccgtacgcgacgtgttcggcctggccggtgacatcccgttgtcgccgatccggcgcgtcgaggaagacaagatccgcatcggcctgcagggcctgcagctggtcgacacccgcgcacagctgctggcgatcgacgatctgcgcgacaccgcagtggacgaatacgccctggtccgcgatgcctggatgcagcgccgcaactaccagatcgagaacgatctgcgcagcaagcgcgaccgcggccatgacgatgccaattcgccgatcccggtcgatgcgatgccgatgccgcagtggacccactgagaccgtgcgacggtgcatgaaaaaccccgcctcggcggggtttttcttttccggtgggtgccaaccctgggttggcacgccgtgctcaggccgccagcgcggcctcgatggcctcgcgcaggcgcgcgtcatcggcggccacgtccggggcaaagcgtgcgacgaccttgccatcacggccgaccaggaacttctcgaagttccacagcaccgccggtgccggatggatcgggatctccttgctggccaggcgctcacgcagcgggccttcgccgatcgactgcggctgcgcggcggtcagctgctggtacagcgggtgggtgtcctcgccagccacgctgatcttggagaacatcgggaaactgacatcgtaggtgagctggcagaactgctggatctcggcctcgctgcccggctcctggccaaggaagttgttggcggggaagcccagcacttccaggccctgcgcgtgcttttccgcatacagcgcctgcaggccttcgtactgcggggtcaggccgcacttggaggcgacgttgaccagcagcagcaccttgccctggtagtcggcaagcgaggacggctggccgtcgatggtggtgaggggaatgtcctggatcggggtgctcacgcgggggctccggctacggcggggaatggtccaccagcatagcgccgcgcgcgctgttgtagagccgagcccatgctcggctgatggtatggcagccgagcgtgggctcggctctacaggcaggattcagtccacgcagatcgtgccctgcgccttgccatcatcgatgcgctggcggcacccgaagttctggcgcacatcacgctggcaggtaccggtggcggcactgccggcggccacctcggctccggccaggcactggcccgtgcagtcgctcttgcggctgcaggccttgccggcgtccgcatagggaatcacgcactgctcgcgctgcaggcggccgagccgctgcagcgtgccgccagcggcctggcagtcgacgtcacgtgcttcgcggtaggcctcgctggcttccggcgcaggagcggccgtagtcgtgtcggcgaccgggggcgtgctgctgcacgcagccagcaacgcagccaggacaagaacggcacaggagcgcaagcgcatgtcgatacccgccacggactcagggtgcccagcatagccaggcgcaggtgcacgggacgtgtcaacccgcattgccgtcctcgtcgtcctccggcgcgcccagctgctgcatcgggtccggggtcagctccgggggcagcgcgcgcttggccttgctgcccagttcggcaagccgacgggcgcggctgatggccgactgcggcgaatcgatcaggcgattgcgcgcatcggcgtaggccttgccggcatcgtccagcttcttgcccatggcggtgaagtcctgcaggaacccggtcagggcgtccagcaccagaccgccggcctcgctgatcttcagcgcctgcttctgcaccttgtcgcgcgtccacaggcgctcggccacgcgcagcagcgccatcagggtgttgggcgaggcgaacaccacgcggttgtcgaaggcgaacgcctgcaggctgccatcggcgcccagtgcggctgacaaggcaccctcgatgggaacgaaggcgatggtgatgtccagcgtctcgctgcccaacgccttcggataattcttctcgcccaggtccttaacgtgctggcgcagcgcaaccgcgtgcctgcgcaacgcgtcttccgactgctccggggtagtggcattcatggcttcctgccaggcgatcaggttcaccttgctgtcgatcaccacgctgcgttcgtcggggaactgcaccaccacgtccggtcgcaggcgcgcaccttcgtcatccacggcatgcttctgccgctggtagtgcacgccctcttccagccccgatccgcgcagtacgttgtcgagcatcagctcgccccagtcgccgcggaccttggcattgcccttcagcgcattcgtcagcgccgatgcctgcgccgccatgtcctggttgagcgtcttcagttcgcccaccgcacccagcaggctggcgcgttgccgcgcttcctcgccatacagcgtatcgacgcgggtgcggaaatcgcccagcttgtcggcgaacggcttgagcagcccctcgatgtccgcgcgtgactgcactgtcgcctgccgcacgttcttctcgaactgctgtccgcgttcgtcgaacaccttgcccgccagttcggcgaaggcgcccgacagcttttccttggcggtatcaagatagctgcgcagttcggcactggcccgttcggagtgctgcagattggccaccgcgcgggcatgttcaccgtgcaactgctggtagcgctgctgcgcctgctgcagctcgctgctggtctccgcaacggcagcgcgcgcctgcgccagggccgcttcacgttcggccagctgtgcttcgcgactggccgacagcgctgcttcgcgctccacccgggcggtcagcgtagtgacggcctgtgcgtgctgctggctgcggctccgttcgttctccagttcagcgctcagcgcatcgaggcggccgcgcagctggccggcatcgaccagggcgaggcgatgctgttcgcgttcgctgtccagcagccgctgcagttcgtcggagggtgcaccgccagcactgcgacgccacagcagcaccagcgcgaccagggtcgccagcagcaggaccactgccaggatcatgaggacttcgatattcatgcgatcagtttagccccgctgcgctaggctgggtcggtctgccccggaagcccccaatgctcgctctgtacggaaagcccacctccatcaacgtgcgcaaggtgctgtggctgtgcgtcggcctcgacctgccacttcaccacgagccagcgccgccggcggacctgctggccacactgaacccgaaccggcaggtgccggtgctgcgcgatggcggcttcgtgctgtgggaatccaacagcatctgccgctacctggccgtacgcgctggccgtgatgacctgctgccccgcgcggcacaggatcgtgcgcgggtcgaacaatggatggactggcaggccagcgacctcaacagtgcttggcggcacgtgttcatggcacgcgtgcgccagcatccggactacccggacgatgcccgcgccgaggccagcctggcccagtggaacggcttgatgggcgtgcttgatgcccagttggccgctggcggctacgccgctggcaacaccttcaccctcgccgacatcgtgctcgggctgtcgacccagcgctggcgcagcacaccgggccacaagccggcgctggcacacgtgggcgcctggttcgagcgcctgcgccagcagcccggtttcgccgaacacgtcgacaacggcgtggcctgaggcaggggtcagatcctttcccgggaaagatatctgaccccaagggcgcgggaacgatccggcgttaccagccttccagcacgatcttgcccttggcgcggtggctctccagcagcgcgtgggcgcgccgcaggttggccgcgtcgatgcgcccgaagtgctcgcccagcgtggtctgcagcacgcccgtgtcgatcagctcggccacacggttcagcaggtcgtgctggcgctgcatgtcggcggtgcggtacagcggccgggtgaacatcgactcccagtgcagtgacaacgccttgcgcttgagcgccatcacgtccacctggccaggatcatcgatcagccccagctggccctgcggcgccagcagttccacgatctgcgcgtagtactggtcggagtgggtcaggctggccacatgctgcacttcgctgatgccgagccgcgccagtccctcggccagcggcaggcggtggtcgatcacgtggtgcgcgcccattgcgtatgcccagtcctgggtatccggacgcgaggcggtgccgatcacggtcagcctggtcagcttccgcgccagctgcaccaggatcgaaccgacaccaccggcagcaccgatcaccagcagggtctggccctcgccaccaccctcggggatgcgcaggcggtcgaacagcagctcccaggcggtgattgcagtcaatggcagcgccgcggcggcggcatcatcgaggctggccggcttgcgcccgacgctgcgctcgtccaccagctggtactcggcattgctgcccgggcggtcgatgacgccggcgtagtagaccgcgtcgccgggctggaacagggtcacctcgctgcccaccgcgtcgacgatgccgaccgcatcccagcccagtacgcgcgggccatcggtggccacgccgcggcggaccttggtgtcgaccgggttcaccgccaccgcgcgtaccgccacgcgcaggtcgcgggggccgggctgcggcagctccagttcgatgtcgatcagggcccgggcatcatcgatcggcaggccggcgtgggtataggcaatggcgcgcatggcagcggtccagtggggaaggaggcgacaggttgcgccgcgcgcgctccctcggaaaggcgcagaatcgggcagcactttcactctggcgatgaagatgatccgcttcgacgatctgcagctgttcgtccgcactgccgcgctgggcagcttctcgcaggccgcccgcgaggccgacctgctgcccgggcaggtcgctgcggcggtggctcggctggagcgcgagctggacctgcgcctgttcgtgcgcacgacccgcagcctgcgcctgaccggcgagggcgcgctctacctgccgtatgcgcaggaggtgctggccaccctgcgcgaaggccaggcccgcgtgcagggcgaggacaccgagctgcacggcatcctgcagctgtcggcgccgtcggacttcggccgcaacctgctgttgccctggctgagcgcgttccgcgccgcgcacccgcggctgcgcctgcacctgcgcctgtccgacgaggtcgccgacgtgttccgcgaaccggtcgacgtggccatccgcatcggccacttcgatgacgccaactacgtagccctgcccctgctggaaggcaaccggcgcgtgctggccgcctcacccggctacctgcagcggcgtggcccgcccacgcgcctggaggatctgcgcgagcacgactgcttggtctatcaactcaatggccgcgcctacgatcgctggtcgttcgaggtggacgggcgccgcagcgtggttccggtacgcggcccgctggtctgcgacgacgccgacgtggtgcggcgctgggccgtggccggcgaaggcatcacctacaagtcctggctggacctgcgcgaggatgtgctggccgggcgcctgcaggtgctgctggacggcgttggcagcagcatcccgctgcagctggtgtgcccgcatcgcaagcagttctcacccgccgtgcggcagctgcacgcgcagctgcgccagcacctgcaaccgctgctgtccgggatgccggttggccccaccggccccctgtcgcccgccgcagcgctggccgacaatggcggccccccgtaacagaagagcaccgccatgccgtggatgggcatccaggacctgtggacgtttctggtcgccgtgctggtgtttctcgccctgcccggtcccggtaccttcacgctgctgactgccaccggccgtggcggcgtgcgcggcggctacaccgcactggccggcctgctggtcggcgaccagatcctgatgtggctggcgctggccggcgtggcggcgctgctcaaggccaatcctctggtattccacgccgtgcagtacctcggcgcggcctacctggtgtgggtcggcatcagcctgctgcgcacgcccaagcacgagggcggcgacgccggcccgatccgcatgcaacccggccgctacttccagcaggcgatcctggtcagcctgctcaacccgaaggcgatcctgttctacatggccttcctgccgttgttcatcgatccgaaggcgcaccagggcatcgccaccttcgccgcgctggccggcatcatcctggtggtcagcatcgcctactgctcgatgctgatcggcgtgggcaacctggcccgccgccggttgatccagcacccgcggatcagcgatgcgctgcgccgcgtggccggcctgttcctggtggggttcggcatccgcctggggctgaacggatgaacgggcggctgccactgctcggcatgaccctgctgctggccggtgccgcctctgccggcaccgtgcaggaccatcgctgcctgacgggcggtcgcaacgacaacatccacctggaatggcgctggctggaagacggccgggccgacgtgcgttacgccggccagcgcgagcgcctgcccctgcaccggatctcgatggagaccacggtgctggccgaggatcgcccgtaccagttcgacagcgtgtgggaagagcgcatcgacgggcgcctcaacggccgctacctgctgagcacgcagggcgcgctggtactggatctgagctacgaacgcgcccgtgatggccgtcgcaccaccttccacgatgacagccaggcgtggcaggaggatggctgccattggccgggaggcgtagcggcgcgcgtggtcgattgaagcatgccaaccaaggttggcatctaccggtcgtgcatctccgcgcgcaggtggtcgatgaacacccgcagcttgggcgccatctgctcacgcgcggggtagtacaggtggaagccggggaatggcggctgccagtcctgcagcacgctctgcagtcgcccggcggcgatgtcgtcggccatcagcgaggcgaagccctgggccatgcccagccccgccagcacggcgcgatgggcgacgccggcatcgttgaacaccagccgtccgctcacttccacgtccaggtcgtggccttcgcggctgaattcccagcgcatcagccggccgttggccagccggtgcacgatgcaggcgtggccctgcaggtcatgcggggtctgcggcacgccatggcgttcgaaataggccggcgtggctaccaccacctgccgctcgggtggcccgaccggcaccgcgatcatgccctgtgcgagtgattcgcccaggcggatgccggcgtcgaagccctcggccaccagatcggtcagcgcggggtcgacgcacagttccacctgcacctgcgggtaacgcgcaaggaagtcgggcagccgcggcagcaccatgcgatcggcgacgatgcgcggcagggtcacgcgcagccgcccggcaggcaccgagcgcgcgctgtccagttcggcaaatgcctggtcgatctggtccaggccgccgcgcacgcgctgcaggaaacgcgcgccgtgctcggtcaggttgacccgccgcgtggtccgctgcagcagccgcacgcccatccgcgcttccagcgcgcgcacgctctgcgacagcgccgaggtcgacacacccagggcatcggcggcgcgggtaaagctggcgtgctcggccacgtggacgaaagcgaccacagcagtgagcgggacggaggcatccattgtgaaggcagccttcaaggtaagtccggtgacacgcagtttatccacatgatggcgtggaggatgctgtgcccctcgccactgcccatccagacgtggcgccttccccaaggagatccacatgaagacccgtactctcggccccgccggccccaccgtgtccgccctcggcctggggtgcatgggcatgagcgcgtactacggcggccgcggcattgacgatgacggcattgccgtcatccggcacgcgctggaccgtggcgtgaccctgctcgacaccgccgatgtgtatggcccgcacaccaacgaggtgctggtcggtcgcgcgattgccggccgccgcaaccaggtgttcctggccagcaagttcggcatcggcctggacccggctgacccgaaggcgcggcagatcaacggccacccggactatgtgcaggccgcctgcgaggccagcctgcgccgcctgggcgtggaccacatcgacctgtactaccagcaccgcgtcgacccgaccgtgccgatcgaggacaccgtgggtgccatggcacgcctggtggaacagggcaaggtgcgctggctgggcctgtccgaggcctcggcggccaccctccgccgcgcccatgcggtgcacccgatcacggcggtgcagagcgagtactcgctgtggtcgcgcgagccggagcagaacggagtgctggccaccacggcggagctgggcatcggcttcgtgccgtattcgccgctgggccgtggcttcctgaccggcgccatccgcagcccggacgacttcgacgccgacgattaccggcgcacctcgccccgcttcgaaggcgaaaacttccagcgcaacctggcattggtggacaccgtgcaggcgctggccgccgagcgcggcatcgctgcctcgcagctggcgctggcctgggtgctgtcgcgcggcgggcacatcgtgccgatcccgggcacgacgcggcgggcacggctggacgagaacctcgctgcactgcaggtggaactggatgcggccacgctggacgcattggatgcggccttcccgctgcatgccgcggccggcgaacgctattcggacagcggcatggccaacatcgagtcctagcgggggccgggacgaacgtacaccggtggctgccgccggattatgccgattccggcagcctggccggggcgcagcgcgtgccccgccatgcatgacccccgtcagtggtaatgctgcgctgcgttcggtcacactcgggaacttgtcgttcttagtcaccccttccgaggcctgcatgtccctgttccggcgcaagtccctagattccgtcaccgtccacgaagccggcaggcgcctgatcccgacgctcagctggccgcacctgatcgcgctgggcatcggtgccatcgtcggcaccggcatctacacgctgatcggcgtcggtgccaacctggccggcccggccgtgctgatctccttcgccatcgccggtgcggtctgcgcctgtgcggcgctgtcctatgccgagctgtcgacgatgatgccggccgccggcagcgcctacacctacagctacagtgcgctgggcgaggtgttcgcctgggtggtgggctggagcctgatcctggagtactcgctggtggtgagtacggtggcggtgggctggtccggctacttcgtcggcttcctcgaatgggtccacacccagttcggctggaacgtgcacctgccggcctggctggcagccggcccgcacgtggaaggcggcatgatcaacctgccggcgatcatcatcacctggctggtggccggcatgctgatggccgggaccaaggaaagcgccacgctcaatgccatcctggtggtgttcaagctgatcgcgctggcgatcttcgtggccgtggccctgcctgcgttcgacagcgccaacctgcagccgttcatgccgtatggctttgccaagtcgatgggccccgatggcgtcgagcacggcgtgatggcggcagcggcgatcatcttcttcgccttctacggcttcgatgcgatctccactgctgcggaggagaccaagaacccgggccgtgacctgtcgatcggcatcatcggttcgatgatcggctgcaccattgtctacgtgctggtggcgctggccgcagtgggtgcgatgagctacgccgtgttcgggcacagcgccgagccgctggcgctgatcatgcgccagctgggccatccgacagcggcgatggtgatcggcgtgattgcgatcatcgcgctgccgaccgtgctgctggccttcctgtacggccagagccgcatcttcttcgtgatgagccgcgacggcctgctgccgcgtggcctgtccaaggtcaacgcgcgtaccggcacgccggtggcgaccacactgttcactgcggtggtggtgtcggcgctggccggcgtggcccgcctggacgagatcgccgcgctggccaatgccggtaccctggccgcgttcactgcagtgggcgtctgcctggtggtgctgcgcctgcgcgagccggaccgcgcgcgcacgttccgcacgccgctggccttcgtggttggcccgctggccgcgctgggttgcatctacctgttcatcagcctgccgcacaccacccagctgtacttcctgttgtggaacgtggccggcctggtgctgtacttcctgtacagccgccgccacgcactgatcgcgaaataaccggctcgccggtggtgccggccgttggccggcaactcgtatcctgttgtgccggccggcggccggcaccaccgcagggcgtttcaaccgccctgttttgccgcgtaatcctgcgcctggcgcatcacccgcagcaggttgccgccccagatgccggcaatctgctgctcggtatagcccttgcgcagcagccaggcggtgatcttcggcagctggctgacatcgggcagatcactcaggccaccgccgccatcccagtccaggccgatgcccacgtgctcggggccgaccaccttgaggatgtgctcgaagtgggcgaagaaatcatccaggctggcgtggcgcaccgggtgctcgtggtccagtgcctgctcggccttcagcagggcaacaccctgctcgatgcccatgccttcccagccgcccagctgcctgctcagcgcttcttcggcctgcgtgcgctcgggcgtcttcgcggtgtcgatcaggtagccgccataggcgttcacctggatcacgccgccggccttggccagcttgcgcagccgcgcgtcatcaagattgcgcgggtggtcgtacaccgccttggccgagctgtgcgacagcacgaagggcaccggcatcatcgccagcaggtcgtcgaacaccgcgtccgaggcatgcgactggtcgatcacgatgcccagcttcactgcctgccgcaccagctccttgccggccgggctcaggcccttccactccgcgcccttgggatcggtggccgaatcggcgaactcgttgttggcgaagtgcacggtgctgagcagccgcaggccggcgcggtggtagaacgagagcaggctcgggtcttccaccagcgggctggcattttccatgctgatgtagaccacgcgcttgccggcggccttgatccgcgccgcatcatcggcggtcagtgccagcgcgaagcgcgcgggattggccgccagcatctcgcggatttccagcagtcgctgcaggccgtggtcacgctcggccaggtgggccgctgcgctgcgatcgccctggtcggtgtagatcgcccagaaaccgccatcgagcgcaccttcgaccatgcgcgggtagtccacctgcgaaagcgcgttgcggtcgtggcgctgctcgatgtcgaagccggtgcggccgaagttggccggtgtatccagatggctgtccagagtgaccaggcgctgctgcagcgccttggcgcgggccagttcctgcgcactgaactcgatggcgtgggcggacagcggcgcacacagcgccagggcaagcacgacggacaggtggcgcaacgatggcatgggctctcaccggcaatgggaagagcccgaccatagcgctgcacccggcctttttgtagagccgagcccatgctcggctgccagacagatcatccgaccgtgggctcggctctacagagatcggcagtgacgcggtcagtccaccacgcggcagaacacggccttcaggtaacgcgattcctgcacgtgggccatgaacgggtggtccggaccggcgccggccaccttcaggatctggatcgtgcggccggagaaatacgccgcgcggcgcagcatgtcgaggaactggtcctcggccaccaggccggtgcaggagaacgtggcgaacaggccgcccggcttgaccacgcccagcgccagcttgttcatgtccaggtacttcttcagcgcagtgatgacctggtcgcggtcgcgggtcatcttcgccgggtccaggatcaccacgtcgtactgctcgccacgattggccgcatcacgcagccacgggaagatgtcggactggacgaacttcgggcgcacgttgttcaggcgcgaattgcccttggcgatctggatgacgtcttcatcgatgtcgatgccgaccacttccgaggcgcctcgcgccgccgcgtacaccgcaaaaccgccggtgttgcagcacaggtccagcacgcgcttgccttccacctgctggctcagccactcgcggttctcgcgctggtcggcgaagaagccggtcttgtgcgcaccggccgggtcggcgcggaacttgatgccgtactcggtgatcaccgacgcttcggtggtggtattgccgtggaaatcgaagctttcctgtttctgcacgtgctcatcggcgaagctgtggaagcggcaacccgggaactgctcgcgcagggcgtcgtagatccactcgcggtggcggaacatgccggcggcgaagaattcgaccaccaccaggtcgccgtagcgatccaccaccaggccggacaggccgtcgccttcgctgtgcaccacgcgccaggcgtcggagaccgcgtcgagcttgagcacctcacggcgcagcgacaccgcctgggcaatcttgcgcgagaaccagccggcatccaccggcacgttctggtcggtctcaaggatgcgcacggcaatacgcgaatgcccgttgtagaacccgcggccaacgaactcgccatcaatgccgaccacgtcgacgatggaaccgggcttgggccggacggtcggcttctcgaccagtttctggaagatccacgggtggctggagcgccacgcattcttgaggcggacaatcggaaggggggtattcatccacccattgtaaaccgggcgccggggtcagatccccgcaggggctctgacccccgccggcgtgccaaccaaggttggcacccaccaggccggaacgggctcgggaatggggtcagagcccctacggggatccgacccctcgtcccccatttgacgtcggcccagccagacggcagaatcggcgccagaaggggagtagctcccagacgttgtcgccgtcatttcgagcccgcaggctccggtgcaacggcagttccagccgactggaactgcgagcgagaccttcgccgtactggcgaagctctgtccctggatccccctcccgatcctccgttgcagatcctcgccgtccggcctggcattcatctttccaacggacattcccaatgcagacgatcggtaacgtgtggttgtggggcggcttcgcagcggtggtggtcatcgccctgctggtcgacctcgtgttgatgcgccatggtggaccgcacaaggtcaccttcaaggaagccctgtggtggtcgatcggctgggtcgcgctggccctgctgttcaacgccggcctctggtactacctgaatgagaccgccggccaggtggtggccaacaaggtcggcctcgaattcctgaccggctacctggtcgagaaggcgctggcggtcgacaacatctttgtgttcctgatgatcatgagctacttcgcagtaccggaggagcagcgccagaaggtgctgatcatcggcatcctgggtgcgatcgtgctgcgtacgatcatgatcttcgccggcagcgtgctgatcagccagttccattggctgctctacgtgttcggtgccttcctgctgttcaccggctggaagatgtggttcgccgccggccaggaaccggatctggaaaccaaccccgccctgcgctggatgcgcaagcacctgcgcctgctgccggactacgccggcaatgcgctgagcgtgaagcgcgatggcgtgcgctggttcaccccgctgttcgcggtgctgatcctgatcgcggtcaccgacgtgatcttcgccgtggacagcatcccggcgatcttcgcgatcaccaccgacccgttcatcgtgctcacctccaacgtgttcgcggtgctgggcctgcgtgcgatgttcttcctgctggccggcatggccgaccgcttccacctgctgccgtacggcctggcgctggtgttggccttcatcggcatcaagatgatgatcatcgacctgttcaagatcccgaccccggtgtcgctgggcgtggtcgcggtgatcatcgccgccaccgtggtgctgagcctgaagtacccgccgaaggaaggctcgggccacgcctgagcctgagcggtgggaagacgcggccggcgggattgtcccgccggccgcacccactctcccgcaacagtggccttggtttcgcgccagccaccgccattgctgaggtatggacaacaacacgcccctgcccgccggcgacgtgccggccccccgcaatgaccgctcgcgcatcctgcgggcgttcaatgtcagcctggcggccgtgctggtgctggtggccgtgttcgccctgcagggcacgttcgactggcgaccgtgggcggttgcgccgctggaagccaagggcctgctcggcctgatcggcggcccgatgctgcatgcctcggtcgagcacatcgccgccaacagcatcgccatcctgatcctcggcaccctggccggcagtgtgtatcccaaagccaccgtgcgcgccctgcccctgctgtggctgggttcgggcctcggcgcgtggatgctgggcaatccgggcagcgtgcacctgggtgccagtggcgtgacccacggcctgatgttcctgctggccagcctcggcctgctgcgccgcgaccgtgcggcaatcgccaccggcctgatcggcatgctgttctatggcggcatgctgatgaccatcctgccgcatgccgatggcgtgtcctggcagtcgcacatgggcggcgccttcgccggcatcatcgccgcgctgctgttccgcaacgccgatccgctgccgccgcgccagcgctacagctgggaagacgaagaagacgaggccgagccgctggccgacgacgagctggagccgccgtctccgcagcgcgtgccggtgttgtggcagccgcgcgagggccaggactacgtggtgatcccgttccgccggccggacgagccgcgcagttgaggggacggtcgtgccggccgctggccggcaacctcatgaaccggtagtggccgaccttggtcggcgcggttgttgcgtgccaaccaaggttggcacctaccagagcacaccggcccccgggtagcgccgggccatgcccggcgcgttgatcgctcagttccccgctgcgcccatcccatccaccgcctgccggcccagcgccggatcatcggtgaagaaggcatcgatgccggtcgccaggtaggcgcgcatctcggcgatcgagccttcgacgttgcgcgcggtgtcggcgcccttgcgcaggttgctgggctggaaatggttctccgggcggaaggtgtacggaatcaccatcaggccggccgcatgcgcatcacgtaccagcgcggtcggcgtgcccagcgcgcccttggcatccagcggaatgatcgagcgcagctcggggccgatgccatcggcgtaggcggcgatgtccttcagcccggccggggtcatcatctgtgcgtaggtcagcgtgccgccggccttggcgatgtcggccggctgggtatcgcccttccacagcagctgcagcaggcggatgttgctgccccggccgatcttgccatgcaggtagcgcaggttggcggtctcgaacgactggatcgtgaccgggccgacattggtgtacgcgttgccacgcagcgcggccagcagcttgtcttccatcggcaggccgatggactggaaataggtcgggtgcttgatctccggcacgaggccgatgccacggttggcgcgcccggcctgctgcaccaggaaggccaggatctcgtccaggctggcgatgcggaactggccgtcgtaggcggtgctgcgcagctccggcaggcgctcacgggcgtacagggtcttcagctcggccagggtgaagtcctcggtgaaccagccctcgacctgctgcccatcgatcaccttgcgggtacggcggttggcgaactccggatgcgaggcgacgtcggtggtgccgccgatctcgttctcgtggcgggccaccatcaccccgtcccgggtcatcaccaggtccggttcgatgtagtcggcgccatcggcgatggcctgcgcatacgaggccagggtgtgctcgggcagcagtgcgcttgccccgcgatggccgtagaccgacaccttgggcacggccggggtggaggattcagcactcatggccaccgatggtgccacggccagcgacaacagcaacgcacaaccccacgacttcactgcgacttccccaagcggtatgtgatgggcgtcagtatgcggcggcaatgtgacaggtgggggacctggggtcggatccccgcaggggctccgaccccgtggcggaaccgtgcagggtcagagcccctttggggatctgaccccgtgttacttgccgatgcagaaactggagaagatcctccccagcagatcatcggcactcatctgcccggtgatctcacccagcgcatcgtgggccagccgcagttcctcggcggccagctccaggtgctcgtgcgccagctcgccatcggcgcgctgcgcatgttcctgcgcgcgttcaatcgcatccacgtggcgcgtgcgcgcggagaactcgccgtccacctgctcaccggcaccggccgaagcaatcgaacgcaggcgcgcatgcaggtcgtcgagcccggcgccggtggcggccgaaacgaacacccgatccggatcagccagcgacggcaacgccgccagcagatccgacttgttatggatatagaccttgtgcggtaccgccgccacggcctcgcccagcgccgcttcaccggccgccggatcgcgcgcatccagcacgatcagcgccaggtcggtgcgctcgatttccacgtgggcgcggcgcatgccttcgcgttcgatggcgtcgccgccgtcgcgcaggccggcggtgtcgaccagggtcagctccaggccatccaggcggatggtttcgcgcagggtgtcgcgggtggtgccggcgatgtcggtgacgatggcgcgttcgctgccggccagcgcgttgagcagtgaactcttgcccgcattcggcggaccgatcagcaccgcgtgcaggccatcgcgcaggcgacggccgcgttcggcatcgcggcgcagaatggccagatcgctgcgcgcctgttccagcccacgccgcacctgcgcgccaccgagggtatccagcggttcgtcggcgaagtcgatggccgcttccacgtggatgcgcagcagcaccagctgctcgaccaccgcatcgatgcggcgcgagaacacgccatccagtgaacgacgcgccgcgcgtgcggcacggttgtcgcccgcggcgatcaggtcggcgatggcctcggcctgggccaggtccagcttgccgttgaggaacgcccgttcgctgaactcacccggccgcgcctggcgcgcaccgagcgcgatgcagcgcgcgaccagctgctgcagcagcaccgggctgccatggccctgcagttccaccacctcttcgccggtgaaactgttcggtgccgggaaccacagcacgatgccatcgtcgatgacctcgccgtcggcatcacgcaggcgcgcgtagtgcgcgtggcgcgggcgcagtgcaggcgcccccagtgcattggcaatcgccgcagcgcgcggaccggacaggcgcaacaggccgacaccgccggcgccgggggcgctggcgatggccacgatggtgtcggtgcggatcgcgtcgttcatggctcagagcttctccagctgcgcgcgcgcctgggccgcgccactgccctgcggctgcagcgccaggtaggtggtgtaggcctgcttcgccttggccttgtcgccggcgttgaagtaggcatcgcccaggttcagatgggccaccgcgcgcgacgggtcgatcttcagcgtgttctccagccagcgcgcggcttccgcatagcgctgctggcggtagtagacgaagccgaggttgttggcggcctgggcgaaatcaggacgcagcttcagcgcttcggcgaactgcgcggctgcctcgtcgtactgcttctcgcggtacagctgcaggccgcggtcgttggcctgctgcgcgcgctggcggtctgacgccgggccagcggtgggcaccaccagcttggccttgccaccctgcaggtcggccaccgtcaccggcgcctggctgcccttcgcctcgctggccgcatccaccttgttgttcagcgcgatcgcatcggcggtcagctggcgcgtatcggcgttgaggaattcctggctgtccggcacctggaacacgaactcgccgccctgcgaaccgggcaggctgccgaaggccggggtctggtgcgagaccgccgatacggccggcgccacgtaggcggccagctcggtaccggtgatcaggccgtcgccgttgaggtcgcccttgccggccagcgcctgcaacagcacccaggtgaacaccgagtggccgttggggccagcatcggccacctgctggtcggcaccaccggcggtcagcatctgccgcgcgctgcgacgcgcgttctcgcgcaggaacgacgacgacgacgggccaccgcgggtcaggcccaggccgctgtagcaggcatccatcacgaacatcacatgcttggcctgcatgctctcggcaatgttctggatgtcggtcatcgcgatggcgtcggtggcgaattccttcgggtccgaatcgaccggaatgatgtagcccaggtcgcgcccggaagcgagctggcgggtcgcgccatggccggcgaagaacacgaacacgcggtcgttcttgccggtgcggtcatctgccaggcgatcgtggaaggccgcgaggatgttgttgcgggtcgcctgctcgttcttcagcacgatcacctgcgaggacgggaagccgaactgcccggtcagggtatcggccaccgcctgcgcgtcgtggctggcgtactccagcttcggccacttggcatagttgtcgatgccgaccacgatcgcccaggacttctcgtagccggtggtgaccgtggcggcaccggcttcacccttgcgcgcacgggcgacagtgaagtcacggccgttccagccggcgaactggtaaccatcggcgatcagccggtcgaggatctgcggcagcgccttcaccgcacgatcgtggatgtcgtggaacaggatgatgccgcgctgttccttgttcacctggtctagcacgcgccgcacgatcgattccggtaccgggtcggcccagtccatcgagtcgatgttccacatgatcgacttcagcccggcctcgttgagcagctgcaggccttcggcattgcgcgcgccatacgggaaacggaacagcggcgcgcgcttgctgtcgacatccttcagcagcgtgtcggtgtcgagcacctgctggcgcagcgcgtcaccggtggtgcgcgacagctgagcgtgggtcaggctgtggttgccgaccgcatagccctcttcgatcaggttgcggctgatcttcgccatcgggccgaggctgaccttgccatcggcctcgaccttgccaaggttgcggcccacttcaaagaacacgcccggcacgtcgtagcgcttgaggatggccaccacttcatcggtataggccttgtgcgggccatcgtcgaaggtcagcaccacggtcttggccggcaggtcgcggccgaagatctcgcggtcgctgtccttcatcgacatcgggtagggctcgatcacgccgtagtcgcgcaggatcgcttcgcggctgtagtccttgtgcaggtgggcgatgtagtcgtcccacttctcacgcttcagctcgatggcacgggtgcgctcgaagcggctgaagatgcgggtcagttcctggttgtagtttcgctcgatctcgtcgagtgcctccaggtcctcgccgatgcgctggtgcagcttgaccgccggcagcgacgaatcagtgccgacccgctcatgcagatcacgcagcacttcgcggaaggccaggcggtcggcgtcgaacagttccggcgccgactcgatgtagtccagcacggtgccgagggtggcgaagcgctgcgggctggagccgcgcagcagggtgtcgaactgcgcggcgatcgccgtgcgctgttccaggccatcgtggaacagctgctggcccacacgcgtggaggtgccgcggtcggcggccgattgctgttcctcgtctgccagcagcacgatgatccggcggtagccgtcgagctgcttctgcagcgccgccagcaacggcgcggcggccggatcggcggcggccgcggcctgcgcgcttggctgggtgacggtggtcgccggcgccttcgcgtccttgtcgccgcagccggcaacaaccagggtcaacaacagcgagggcaggaacaggcggaacgacgacgcacgcggcatggcgaactcgaaggtgggaggaacggtgtgccggcgattctaccgccgcatgcgaaaagcccgccttgcggcgggcttttgctggggtcagccggccagcggccggctctaccgattacttcttcttgaccggggccggagcggtggtggccgcaaccggctcgccgccatggcgcttggtcatccaccactgctgcagcaggcccaggccaccgttgaccacccagtacaggaccaggccggacggcatgaaggccatcatgacgccgaacaccagcggcatgaactgcatcatcttctgctgcatcgggtccatgcccggtgccggggtcagcttctgggtgaaccacatcactgccacgttgatgaccggcaggatgaagtacgggtcgcgtgcggtcaggtcctggatccagccgaaccagggcgcctggcgcagttcgaccgattccaccagcacccagtacagagcgaagaagatcggcatctggatgaggatcggcaggcagccgcccatcggattgatcttttccttcttgtacagctccatcatcgcggtctggaacttctggcggtcatcgccatagcgttccttcagctgcgcgatgcgcggctggaagcggcgcatcttggcaccgctcttgtactgggtcgccgacagcgggtacagcaccagcttcagcagcaccaccaggccgacgatcgcccagccccagttgccgaccagcttgtgcacctggttcagcacccagaacaggccctggccgatcaccgccatcatcgagaagcggctgtagtcgaccacgcggtccaggcccggcacgtcttccttggcgatcaggttgaccagcttcgggccgacccacaggcgggcctcggtgctggtggactggcccggggccacggtgaaggccgggccacgcgcttcaatcaggtcacgaccggccacctgcgacagcacgtagtgcgcggtctggtccttctgcgggatccaggcggtgaagaagtgatgctgcagcatcgccagccagccgccggtgatgttctggttcagtgcgccgtcgtccaggtaatccttgaacgcacgacgctggtacttcttgtcgttgtcataccaggtggcgccgttgaagctgaacgaatccgggttggtcatgctccgcgacaggatggtcggggtgcggtccagggtgcggtagacgtagccgttccacggtgcggcgccggcattgctgacttcgtccttgaagcgcacggcgtactcgttgcgcgagacggtcagggtgcgcttgatggtcacgccgttgtcggcggtccacacgaacgggatctgcagttcgttctggcccttggccagcacgaagtccttggtatcaccgaccagcttgaagccgtcagcgccgggaaccggggtgttcttgtcttcgctggcccagccgctgatcgcgctgtacggatgcgcggggtcttcggtcagcaggcgaaccggcgggctgccttcgtccttggtctgcgggaactgcagcagctcggcatcgagcacacggccgccgtccagcaccaggcgcagcacgtcggtggtgacggtcacgcgctggctggccggggtggcgctggcctgggcctgcacagcggcctggcccggcgcacccgggacctgcgcgctggggatgctgcccggggtcgcgcccggaacactctgtgcagcagccggggccgacgtggtcgtcggtgccggggtcggagcagccttttcacggctccactccatccacagcagcacggccaccatcagccaggcaaaaatgaggaatacgcgggtctggttcatcagcggacaggctcggcggggccgggacgcgatgccggctcggtcaaagaaggagttgcgatgccatcaggcggcggcattgtgccgtccacgcccggcgcgggcaatgcacgcaggcgacgcagcaggcgcaggaaggcctggcggatctcgtcgttgctggcggaacgcgcagcactacgcgccacgacgacgaagtcgcctggctggatttcggtacgtgtctgacgcaggatgtcgcgcaggacgcgcttgatccggttacgccccacggcgttcggatcaaccttgcgggaaaccgccagacccagcctggccggccggtcagccggcagccagtgcagggtcatcagcggatcggacacacggcgggcgccgttgaagaccgttgaatattcggcacgcgtgcgaacccgcgcagagcgagggaatcgcttgcgcgggtctgcagtattcactgtcgaagggattgcgtctgccgcggggtgcggcatggcaatcaggcgctcaggactttgcggcccttggcgcggcgacgcgacaggatcttgcggccgtcagcggtcttcatacgggcacggaagccgtggtcgcgcttacgcttgaggttgctgggctggtaggtgcgcttcgtggccattgggggcctctcgtatgaatgggacggaaagaaccggaaattctagagaggtaccctaccccgcgtcaacccctggcaggtacgcgaattcaccgggctgtgcaatagctgtggatgtttttgtgaataagtaggggacaagcattccgaaggcgggcgctcggtggtagtctgagccatccatttcccccctttccggcctgtgtttgggcgccttgtcgcgtccatgccccggccaccggacgattattgctg
